(19) United States
(12) Patent Application Publication
(10) Pub. No.: US 2018/0215829 A1
(43) Pub. Date: Aug. 2, 2018

(54) ANTI-IL-17RA IMMUNOGLOBULIN SINGLE HEAVY VARIABLE DOMAIN ANTIBODIES

(71) Applicant: CRESCENDO BIOLOGICS LIMITED, Cambridge (GB)

(72) Inventors: Bryan EDWARDS, Cambridge (GB); Ulla LASHMAR, Cambridge (GB); Brian MCGUINNESS, Cambridge (GB); Mike ROMANOS, Cambridge (GB); Thomas SANDAL, Cambridge (GB); Joyce Young, Cambridge (GB)

(21) Appl. No.: 15/541,876

(22) PCT Filed: Jan. 12, 2016
(86) PCT No.: PCT/GB2016/050067

§ 371 Date: Jul. 6, 2017

(30) Foreign Application Priority Data
Jan. 12, 2015 (GB) 1500461.7

(51) Int. Cl. C07K 16/28; G01N 33/68; A01K 67/027

(52) U.S. Cl. CPC C07K 16/2866; G01N 33/6869; A01K 67/0278; C07K 2317/92; C07K 2317/569; A01K 2217/15; C07K 2317/76; C07K 2317/565

(57) ABSTRACT

Binding molecules that bind specifically to IL-17RA. The binding molecules are useful in the treatment of disease, for example psoriasis.

### FIELD OF THE INVENTION

[0001] The invention relates to IL-17RA binding molecules, and the use of such binding molecule in the treatment of disease.

### INTRODUCTION

[0002] Psoriasis is a chronic relapsing and remitting inflammatory skin disease affecting 2-3% of the world's population (˜125 m sufferers) that causes significant morbidity and decreased quality of life, largely due to clinical flare-ups and disfiguring lesions in visible areas of the skin, systemic manifestations and drug-related side effects. The common form of the disease, termed ‘plaque psoriasis vulgaris’, is observed in more than 80% of patients and is characterized by erythematous scaly plaques (typically on elbows, knees, scalp and buttocks) which can vary in size from minimal to the involvement of the entire skin surface.

[0003] Depending on the degree of body surface area (BSA) involvement, psoriasis can be categorised into mild (<3% BSA involvement), moderate (3-10% BSA) and severe (>10% BSA) disease. Topical agents such as corticosteroids, vitamin D derivatives, coal tar and topical retinoids are the cornerstone of the initial management of psoriasis and are an important part of the treatment ladder applied to patients across the spectrum of disease severity. Patients diagnosed with mild-to-moderate disease are typically prescribed topical agents as monotherapy. Patients with severe disease are typically prescribed topical agents as an adjunct to phototherapy or systemic (small molecule) therapies such as methotrexate, cyclosporine or oral retinoids etc. The treatment regime for moderate-to-severe psoriasis also includes antibody-based therapies.

[0004] In recent years the importance of the Th17 pathway has become well validated in psoriasis and several monoclonal antibodies (mAbs) targeting components of this pathway (including IL17RA) have shown the significant importance of modulating this pathway and influencing psoriasis. IL-17RA is one of a family of related receptors (named IL-17RA, to IL-17RE) which multimerise to form signalling complexes. Each receptor complex exhibits differential binding to one of a range of related ligands (IL-17A, IL-17B, IL-17C, IL-17D, IL-17E or IL-17F). In their active form, all of the ligands are covalent homodimers (except IL-17A and IL-17F which are also known to heterodimerise). It is thought that IL-17A, IL-17F and IL-17A/IL-17F all signal through the same receptor subunits, IL-17RA and IL-17RC, which together form a heteromeric complex. Nonetheless, IL-17A and IL-17F have distinct biological effects. Studies comparing Il17a^{-/-} mice with Il17f^{-/-} mice indicate that IL-17A plays a central role in driving autoimmunity (in particular the pathology associated with psoriasis) and that it does so through primarily through signaling via IL-17RA. The role of IL-17A/F heterodimers is still to be fully elucidated. While psoriasis may have a systemic component in some patients, the disease is primarily one of the skin. IL-17 secreted by Th17 cells acts on epidermal keratinocytes, via IL-17R complexes present on these cells, to initiate a feedback loop of keratinocyte hyper-proliferation and on-going inflammation, thereby generating the psoriatic plaque. It is believed that the primary element of pathological activity is locally in the skin, and therefore inhibition of the IL-17/IL-17R interaction is the best validated target for topical therapy. This is in contrast to other validated Th17 targets, such as IL-23, where a significant phase of activity is in regional lymph nodes.

[0005] Current treatments for psoriasis include topical agents such as corticosteroids, vitamin D derivatives, coal tar and topical retinoids, these are the cornerstones of the initial management of psoriasis (Nast et al., Arch Dermatol Res (2007) 299:111-138) and, depending on disease severity, are typically prescribed as monotherapy.

[0006] Patients with severe disease are typically prescribed topical agents as an adjunct to phototherapy or systemic (small molecule) therapies such as methotrexate, cyclosporine or oral retinoids (Nast et al., Arch Dermatol Res (2007) 299:111-138). Phototherapy can be effective but is inconvenient and associated with a significant risk of skin cancer. Small molecule systemic therapies are associated with increased cardiovascular risk; renal dysfunction, leucopenia and thrombocytopenia. For example, methotrexate may cause a neutropenia and liver damage and is contraindicated for males and females of reproductive age without due precaution. Cyclosporine is a potent immunosuppressant, which has potential adverse effects on the kidneys and blood pressure. Acitretin is an oral retinoid that has a range of side effects, and is also contraindicated for females of reproductive age without due precaution (Nast et al. Arch Dermatol Res (2007) 299:111-138).

[0007] The treatment regimen for moderate-to-severe psoriasis also includes antibody-based therapies. Approved treatments include adalimumab (Humira®), a humanized monoclonal antibody with activity against TNF-alpha(α), the TNF-α inhibitor etanercept (Enbrel®), the TNF-α inhibitor infliximab (Remicade®) and most recently ustekinumab (Stelara®), a human mAb that targets the common p40 subunit of IL12 and IL23, thereby blocking the signalling of both cytokines.

[0008] Systemic biologics have transformed treatment of moderate-to-severe psoriasis but, as with any immunosuppressive regimen, chronic use can have significant side-effects such as increased risk of infections or malignancies. Thus, there is a need for new highly effective and safe therapy options for both topical and systemic use.

[0009] Several other monoclonal antibodies agents in development have been shown to markedly reduce disease severity in patients with moderate-to-severe plaque psoriasis. These agents include ixekizumab (Eli Lilly) and secukinumab (Novartis), both of which target IL-17A, and brodalumab (Amgen) that binds to and inhibits signalling of IL-17RA and therefore would be expected to block IL-17 family members that utilize this receptor, including IL-17A, IL-17F, IL-17A/F and possibly IL-17E.

[0010] The clinical results for the IL17-R inhibitor brodalumab indicate the importance of IL17-RA in psoriasis pathophysiology. In independent clinical studies up to and including significant Phase II trials, it has been reported markedly to reduce disease severity in patients with moderate-to-severe plaque psoriasis, and is said to demonstrate a favorable safety and tolerability profile, robust clinical activity, significant improvements in PASI and other scores for psoriasis severity, and a substantial positive impact on patient quality of life (Papp K A et al. N Engl J Med. 2012; 366(13):1181-1189; Papp K A et al. J Invest Dermatol. 2012; 132(10):2466-2469; Gordon K B et al. Br J Dermatol. 2014; 170(3):705-715)

[0011] Similarly, inhibition of IL-17A (the major cytokine signaling through IL-17RA) by several antibody antagonists in clinical development have been shown to be highly effective for the treatment of patients with moderate-severe psoriasis. In particular, secukinumab (currently in substantial phase III clinical studies) has been shown to down-regulate cytokines, chemokines and proteins associated with inflammatory responses in lesional skin.

[0012] The therapeutic products currently on the market for the treatment of psoriasis offer varying degrees of symptomatic relief and reduced relapse rates but none are currently considered curative and therefore require chronic administration. While many pre-existing topical agents can be effective for short periods of time, due to treatment-limiting toxicity most are restricted to short term use. This means that patients need routine monitoring for side effects and regular cycling onto new treatment protocols. Phototherapy can be effective but is inconvenient and associated with a significant risk of skin cancer and many conventional (small molecule) systemic therapies are associated with increased cardiovascular risk; renal dysfunction, leucopenia and thrombocytopenia. Systemic biologics have transformed treatment of moderate-to-severe psoriasis but, as with any immunosuppressive regime, chronic use can have significant side-effects such as increased risk of infections or malignancies.

[0013] None of the current therapeutic interventions are curative, and therefore all require chronic use. Therapeutic regimens have to take account of this by adopting strategies to reduce toxicity, including rotational or sequential therapies, drug holidays, and combination therapy. Importantly, for some drugs there is an absolute lifetime limit on the exposure that any one patient can safely receive.

[0014] Thus, there is a need for new highly effective and safe therapy options for both topical and systemic use. In particular, there is therefore a clear unmet need for new topical drugs with the efficacy of a biological in patients with severe disease, where a long-term maintenance therapy could keep symptoms under control following systemic mAb use and therefore improve the safety profile for chronic use. Similarly, those patients who are not treated systemically because their disease is considered sufficiently severe, would greatly benefit from the topical, in particular dermal, application of a drug with biological efficacy.

[0015] Antibodies have proven themselves to be extremely effective therapeutic agents for treating a large number of different disease indications. In particular, there has been a clear trend towards development of fully human antibodies for therapeutic use over the various alternatives. Due to their size and other physical properties, however, it is currently the case that monoclonal antibodies have to be administered either intravenously (iv) or subcutaneously (sc) and therefore have a high systemic exposure. Thus, although the antibodies can be highly effective, their route of delivery can often be suboptimal, resulting either in antibody binding to target antigen at non-disease locations (potentially compromising the healthy function of normal, non-disease tissue) or resulting in suboptimal PK/PD characteristics. Either outcome may result in a loss of efficacy and/or a compromised safety profile by virtue of the suboptimal route of administration.

[0016] Due to their small size and other favourable biophysical characteristics, antibody fragments are potentially attractive candidates for alternative routes of administration. In particular, V_{H} fragments are the smallest, most robust portion of an immunoglobulin molecule that retain target specificity and potency. It would therefore be advantageous to deliver V_{H} domain therapeutics topically on the skin, so that they penetrate to therapeutically beneficial locations within the skin to treat disease locally. Any V_{H} that might enter the bloodstream will be cleared rapidly and therefore have little or no systemic exposure, thereby minimising potential mechanism-related systemic toxicity.

[0017] The invention is thus aimed at providing a safe and effective therapy of conditions associated with the Th17 pathway, in particular for topical treatment of psoriasis.

### SUMMARY OF THE INVENTION

[0018] The invention relates to isolated IL-17RA binding molecules, related uses and methods, including their use in medical treatment.

[0019] In a first aspect, the invention relates to a binding molecule capable of binding human IL-17RA comprising a human heavy chain variable immunoglobulin domain (V_{H}) comprising a CDR3 sequence comprising SEQ ID NO. 3 or a sequence with at least 70%, at least 80%, at least 90%, or at least 95% homology to SEQ ID NO. 3.

[0020] In a second aspect, the invention relates to a binding molecule, comprising at least one immunoglobulin single domain antibody directed against IL-17RA wherein said domain is a human V_{H} domain comprising at least one antigen binding site comprising a CDR3 sequence having SEQ ID NO. 3 or a sequence with at least 70%, at least 80%, at least 90%, or at least 95% homology to SEQ ID NO. 3. In a third aspect, the invention relates to a binding molecule capable of binding human IL-17RA comprising a human V_{H} domain comprising a CDR3 sequence comprising SEQ ID NO. 1267 or a sequence with at least 70%, at least 80%, at least 90%, or at least 95% homology to SEQ ID NO. 1267.

[0021] In a fourth aspect, the invention relates to a binding molecule comprising at least one immunoglobulin single domain antibody directed against human IL-17RA wherein said domain is a human V_{H} domain comprising an antigen binding site comprising a CDR3 sequence having SEQ ID NO. 1267 or a sequence with at least 70%, at least 80%, at least 90%, or at least 95% homology to SEQ ID NO. 1267.

[0022] In a fifth aspect, the invention relates to a binding molecule capable of binding human IL-17RA comprising a human V_{H} domain comprising a CDR3 sequence comprising SEQ ID NO. 1767 or a sequence with at least 70%, at least 80%, at least 90%, or at least 95% homology to SEQ ID NO. 1767.

[0023] In a another aspect, the invention relates to a binding molecule comprising at least one immunoglobulin single domain antibody directed against human IL-17RA wherein said domain is a human V_{H} domain comprising at least one antigen binding site comprising a CDR3 sequence having SEQ ID NO. 1767 or a sequence with at least 70%, at least 80%, at least 90%, or at least 95% homology to SEQ ID NO. 1767.

[0024] In another aspect, the invention relates to a binding molecule capable of binding human IL-17RA comprising a human V_{H} domain comprising a CDR3 sequence comprising SEQ ID NO. 2131 or a sequence with at least 70%, at least 80%, at least 90%, or at least 95% homology to SEQ ID NO. 2131.

[0025] In a fourth aspect, the invention relates to a binding molecule comprising at least one immunoglobulin single domain antibody directed against human IL-17RA wherein said domain is a human V_{H} domain comprising an antigen binding site comprising a CDR3 sequence having SEQ ID NO. 2131 or a sequence with at least 60%, at least 70%, at least 90%, or at least 95% homology to SEQ ID NO. 2131.

[0026] In another aspect, the invention relates to a binding molecule capable of binding human IL-17RA comprising a human V_{H} domain comprising a CDR3 sequence comprising SEQ ID NO. 2559 or a sequence with at least 70%, at least 80%, at least 90%, or at least 95% homology to SEQ ID NO. 2559.

[0027] In another aspect, the invention relates to a binding molecule comprising at least one immunoglobulin single domain antibody directed against human IL-17RA wherein said domain is a human V_{H} domain comprising at least one antigen binding site comprising a CDR3 sequence having SEQ ID NO. 2559 or a sequence with at least 70%, at least 80%, at least 90%, or at least 95% homology to SEQ ID NO. 2559.

[0028] In another aspect, the invention relates to a binding molecule capable of binding human IL-17RA comprising a human V_{H} comprising a CDR3 sequence comprising SEQ ID NO. 2575 or a sequence with at least 70%, at least 80%, at least 90%, or at least 95% homology to SEQ ID NO. 2575.

[0029] In another aspect, the invention relates to a binding molecule comprising at least one immunoglobulin single domain antibody directed against human IL-17RA wherein said domain is a human V_{H} domain comprising at least one antigen binding site comprising a CDR3 sequence having SEQ ID NO. 2575 or a sequence with at least 70%, at least 80%, at least 90%, or at least 95% homology to SEQ ID NO. 2575.

[0030] In another aspect, the invention relates to a binding molecule capable of binding human IL-17RA comprising a human V_{H} domain comprising a CDR3 sequence comprising SEQ ID NO. 2579 or a sequence with at least 70%, at least 80%, at least 90%, or at least 95% homology thereto.

[0031] In another, the invention relates to a binding molecule comprising at least one immunoglobulin single domain antibody directed against human IL-17RA wherein said domain is a human V_{H} domain comprising at least one antigen binding site comprising a CDR3 sequence having SEQ ID NO. 2579 or a sequence with at least 70%, at least 80%, at least 90%, or at least 95% homology to SEQ ID NO. 2579.

[0032] In another aspect, the invention relates to a binding molecule comprising an immunoglobulin single domain antibody directed against human IL-17RA wherein the binding molecule has an IC50 for inhibition of IL-6 production of about 0.2 to about 500 nM when tested as described in the examples, i.e. by measuring the ability of IL-17R-binding molecule to inhibit IL-17R induced IL-6 release from the cell line HT1080.

[0033] In another aspect, the invention relates to a binding molecule comprising an immunoglobulin single domain antibody directed against human IL-17RA wherein said binding molecule has a KD (M) value in the range of from 6×10-11 to 3×10-7, preferably in the range of from 1×10⁻⁹ to 6×10⁻¹¹, preferably when assessed by BIAcore®.

[0034] In another aspect, the invention relates to a pharmaceutical composition comprising a binding molecule as described above and a pharmaceutical carrier.

[0035] In another aspect, the invention relates to a method for treating a disease selected from autoimmune diseases, inflammatory conditions, allergies and allergic conditions, hypersensitivity reactions, severe infections, and organ or tissue transplant rejection comprising administering to a patient in need thereof a binding molecule or pharmaceutical composition of the invention.

[0036] In another aspect, the invention relates to a binding molecule or a pharmaceutical composition of the invention for use in the treatment of a disease selected from an autoimmune disease, inflammatory conditions, allergies and allergic conditions, hypersensitivity reactions, severe infections, and organ or tissue transplant rejection.

[0037] In another aspect, the invention relates to the use of a binding molecule or a pharmaceutical composition of the invention in the manufacture of a medicament for the treatment of a disease selected from an autoimmune disease, inflammatory conditions, allergies and allergic conditions, hypersensitivity reactions, severe infections, and organ or tissue transplant rejection.

[0038] In another aspect, the invention relates to an in vivo or in vitro method for reducing human IL-17RA activity comprising contacting human IL-17RA with a binding molecule as described above.

[0039] In another aspect, the invention relates to a method for determining the presence of human IL-17RA in a test sample by an immunoassay comprising contacting said sample with a binding molecule as described above and at least one detectable label.

[0040] In another aspect, the invention relates to an isolated nucleic acid molecule comprising a nucleotide sequence encoding a binding molecule of the invention.

[0041] In another aspect, the invention relates to an isolated nucleic acid construct comprising a nucleic acid as described above.

[0042] In another aspect, the invention relates to an isolated host cell comprising a nucleic acid or a construct as described above.

[0043] In another aspect, the invention relates to a method for producing a binding molecule as described above comprising expressing a nucleic acid encoding said binding molecule in a host cell and isolating the binding molecule from the host cell culture.

[0044] In another aspect, the invention relates to kit comprising a binding molecule or a pharmaceutical composition of the invention as described above

### DRAWINGS

[0045] FIG. 1. Family 1 sequences. This figure shows the full length V_{H} sequence for clones in family 1. Framework (FR) and complementarity-determining regions (CDR) are labelled and shown in table form for ease of reference. CDR1, CDR2 and CDR3 are highlighted in bold.

[0046] FIG. 2. Family 2 sequences. This figure shows the full length V_{H} sequence for clones in family 2. Framework (FR) and complementarity-determining regions (CDR) are labelled and shown in table form for ease of reference. CDR1, CDR2 and CDR3 are highlighted in bold.

[0047] FIG. 3. Family 3 sequences. This figure shows the full length V_{H} sequence for clones in family 3 and shown in table form for ease of reference. Framework (FR) and complementarity-determining regions (CDR) are labelled, CDR1, CDR2 and CDR3 are highlighted in bold.

[0048] FIG. 4. Family 4 sequences. This figure shows the full length V_{H} sequence for clones in family 4 and shown in table form for ease of reference. Framework (FR) and complementarity-determining regions (CDR) are labelled. CDR1, CDR2 and CDR3 are highlighted in bold.

[0049] FIG. 5. Family 5 sequences. This figure shows the full length V_{H} sequence for clones in family 5 and shown in table form for ease of reference. Framework (FR) and complementarity-determining regions (CDR) are labelled. CDR1, CDR2 and CDR3 are highlighted in bold.

[0050] FIG. 6. Family 6 sequences. This figure shows the full length V_{H} sequence for clones in family 6. Framework (FR) and complementarity-determining regions (CDR) are labelled. CDR1, CDR2 and CDR3 are highlighted in bold.

[0051] FIG. 7. Family 7 sequences. This figure shows the full length V_{H} sequence for clones in family 7. Framework (FR) and complementarity-determining regions (CDR) are labelled. CDR1, CDR2 and CDR3 are highlighted in bold.

[0052] FIG. 8 shows serum ELISA data, confirming immunogen-induced heavy chain antibody response.

[0053] FIG. 9 shows in vitro selection Mouse ELISA data: (A) V_{H} isolated from peripreps binding to IL-17RA, (B) V_{H} isolated from phage preparations binding to IL-17RA and (C) V_{H} isolated from phage preparations binding to human IgG1.

[0054] FIG. 10 shows the results of biochemical assays: IL-17RA ligand inhibition assays.

[0055] A: the x-axis shows the concentration of V_{H} (M), the y-axis shows the OD₄₅₀ nm, for V_{H} 49G11 (●) the IC₅₀ (nM) was 900 and for V_{H} 2.1 (▪) the IC₅₀ (nM) was 4.

[0056] B: the x-axis shows V_{H} concentration M (log)₁₀, the y-axis shows the OD₄₅₀ nm, for V_{H} 4.55 (●) the IC₅₀ (nM) was 6928; for V_{H} 3.1 (▪) the IC₅₀ (nM) was 11; for V_{H} 3.20 (▴), the IC₅₀ (nM) was 22; for V_{H} 49G11 (▾), the IC₅₀ (nM) was 885.

[0057] FIG. 11 shows the results of cell-based assays for IL-17RA V_{H} clones.

[0058] A: the x-axis shows V_{H} concentration M (log)₁₀, the y-axis shows the OD₄₅₀ nm; V_{H} SEV49G11 (●) had a weak IC₅₀ (nM), V_{H} 2.1 (▪) had an IC₅₀ (nM) of 363, V_{H} 62A4 (▴) (QVQLVESGGGLVQPGRSLTLSCTASGFTFHDYAMHWVRQPPGGGLEVWAGVSWN GNNVGYADSVKGRFTISRDNAKKSLYLQMNSLRSEDTALYYCAKGGMGSGSHPDSF STWGQGTMVTVSS, SEQ ID No. 2604) had a weak IC₅₀ (nM), V_{H} SEV136H4L (∇) had an IC₅₀ (nM) of 5; no IC₅₀ (nM) was recorded for V_{H} 846A5 (◯).

[0059] B: the x-axis shows V_{H} concentration M (log)₁₀, the y-axis shows the OD₄₅₀ nm; MAB177 (●) had an IC₅₀ (nM) of 65, V_{H} 2.2 (▪) had an IC₅₀ (nM) of 165, V_{H} 1.1 (▴) had an IC₅₀ (nM) of 39, V_{H} 1.2 (▾) had an IC₅₀ (nM) of 141, no IC₅₀ (nM) was recorded for LH86A5 (◯).

[0060] FIG. 12 shows the BIAcore™ traces for IL-17R V_{H} (A) Clone 2.1, (B) Clone 2.2, (C) clone 1.1 and (D) clone 1.2

[0061] FIG. 13 shows clone 2.1 V_{H} family optimisation, the full sequence of clone 2.1 is shown as the top line in bold (SEQ ID NO: 1268). Figure also discloses SEQ ID NOS 1640, 1632, 1664, 1644, 1636, 1668, 1764, 1720, 1724, 1376, 1760, 1692, 1708, 1688, 1728, 1684, 1676, 1672, 1744, 1748, 1648, 1696, 1716, 1712, 1704, 1660, 1752, 1652, 1656, 1736, 1680, 1700, 1756, 1740, and 1732, respectively, in order of appearance.

[0062] FIG. 14 shows specificity ELISAs for clones 1.2, 1.1, 2.1, 62A4 and 86A5.

[0063] FIG. 15 shows epitope competition for IL-17RA V_{H} clones V_{H} 1.1 and 2.2, which bind to different epitopes on IL-17RA.

[0064] FIG. 16 shows HPLC SEC for IL-17 RA for clones (A) 2.1, (B) 1.2 and (C) 1.1.

### DETAILED DESCRIPTION

[0065] The present invention will now be further described. In the following passages, different aspects of the invention are defined in more detail. Each aspect so defined may be combined with any other aspect or aspects unless clearly indicated to the contrary. In particular, any feature indicated as being preferred or advantageous may be combined with any other feature or features indicated as being preferred or advantageous.

[0066] Generally, nomenclatures used in connection with, and techniques of, cell and tissue culture, pathology, oncology, molecular biology, immunology, microbiology, genetics and protein and nucleic acid chemistry and hybridization described herein are those well-known and commonly used in the art. The methods and techniques of the present disclosure are generally performed according to conventional methods well known in the art and as described in various general and more specific references that are cited and discussed throughout the present specification unless otherwise indicated. See, e.g., Sambrook et al. Molecular Cloning: A Laboratory Manual (2d ed., Cold Spring Harbor Laboratory Press, Cold Spring Harbor, N.Y. (1989)). Enzymatic reactions and purification techniques are performed according to the manufacturer's specifications, as commonly accomplished in the art or as described herein. The nomenclatures used in connection with, and the laboratory procedures and techniques of, analytical chemistry, synthetic organic chemistry, medicinal and pharmaceutical chemistry described herein are those well-known and commonly used in the art. Standard techniques are used for chemical syntheses, chemical analyses, pharmaceutical preparation, formulation, and delivery, and treatment of patients.

[0067] The IL-17 family of cytokines includes six members, IL-17/IL-17A, IL-17B, IL-17C, IL-17D, IL-17E/IL-25, and IL-17F, which are produced by multiple cell types. Members of this family have a highly conserved C-terminus containing a cysteine-knot fold structure. Most IL-17 proteins are secreted as disulfide-linked dimers, with the exception of IL-17B, which is secreted as a non-covalent homodimer.

[0068] Signaling by IL-17 family cytokines is mediated by members of the IL-17 receptor family (IL-17R), IL-17 R/IL-17 RA, IL-17 B R/IL-17 RB, IL-17 RC, IL-17 RD, and IL-17 RE. Activation of these receptors triggers intracellular pathways that induce the production of pro-inflammatory cytokines and anti-microbial peptides. IL-17A, IL-17F, and IL-17A/F are produced primarily by activated T cells and signal through an oligomerized receptor complex consisting of IL-17 RA and IL-17 RC. Ligand binding to this complex leads to recruitment of the intracellular adaptor proteins, Act1 and TRAF-6, and downstream activation of the transcription factors, NF kappa B, AP-1, and C/EBP. IL-17E activates similar signaling pathways through a receptor complex formed by IL-17 RA and IL-17 B R/IL-17RB. Signaling by IL-17E induces Th2-type immune responses and may be involved in promoting the pathogenesis of asthma. Less is known about the signaling pathways activated by other IL-17 family cytokines. Recent studies suggest that IL-17C is produced primarily by epithelial cells and binds to a receptor complex consisting of IL-17 RA and IL-17 RE. Autocrine signaling by IL-17C in epithelial cells stimulates the production of anti-microbial peptides and pro-inflammatory cytokines, but like IL-17A, overexpression of IL-17C may contribute to the development of autoimmune diseases. Similar to IL-17E, IL-17B binds to IL-17 B R/IL-17 RB, but the major target cells and effects of IL-17B signaling have not been reported. In addition, the receptor for IL-17D and the ligand for IL-17 RD are currently unknown.

[0069] The invention provides isolated IL-17RA binding molecules that bind human IL-17RA, pharmaceutical compositions comprising such binding molecules, as well as isolated nucleic acids encoding such binding molecules, recombinant expression vectors and isolated host cells for making such binding proteins. Also provided by the invention are methods of using the binding molecules disclosed herein to detect human IL-17RA, to inhibit human IL-17RA either in vitro or in vivo, and methods of treating disease. One aspect of the invention provides isolated human anti-human IL-17RA binding molecules, specifically those comprising, or consisting of, single domain antibodies that bind to human IL-17RA with high affinity, a slow off rate and high neutralizing capacity. In one embodiment, the binding molecule is a heavy chain only antibody.

[0070] In preferred embodiments, the binding molecules of the invention bind specifically to human IL-17RA and do not cross react with, or do not show substantial binding to, other members of the human IL-17R receptor family. This limited cross-reactivity with IL-17R homologues exhibited by the binding members of the invention offers advantages for their therapeutic and/or diagnostic use as side effects by undesirable cross reactivity are reduced. This also offers advantages in dosing for therapeutic applications.

[0071] Binding molecules of the invention are isolated from their natural environment.

[0072] An IL-17RA binding molecule of the invention is directed against, that is capable of binding to human IL-17RA (Protein accession NO. Q96F46 Uniprot, SEQ ID NO. 2601) showing the full-length precursor IL-17RA including the signal peptide) and/or cynomolgus monkey IL-17R.

SEQ ID NO. 2603
MGAARSPPSAVPGPLLGLLLLLLGVLAPGGASLRLLDHRALVCSQPG
LNCTVKNSTCLDDSWIHPRNLITSSPKDLQIQLHFAHTQQGDLFPVA
HIEWTLQTDASILYLEGAELSVLQLNTNERLCVRFEFLSKLRHHHRR
WRFTFSHFVVDPDQEYEVTVHHLPKPIPDGDPNHQSKNFLVPDCEHA
RMKVTTPCMSSGSLWDPNITVETLEAHQLRVSFTLWNESTHYQILLT
SFPHMENHSCFEHMHHIPAPRPEEFHQRSNVTLTLRNLKGCCRHQVQ
IQPFFSSCLNDCLRHSATVSCPEMPDTPEPIPDYMPLWVYWFITGIS
ILLVGSVILLIVCMTWRLAGPGSEKYSDDTKYTDGLPAADLIPPPLK
PRKVWIIYSADHPLYVDVVLKFAQFLLTACGTEVALDLLEEQAISEA
GVMTWVGRQKQEMVESNSKIIVLCSRGTRAKWQALLGRGAPVRLRCD
HGKPVGDLFTAAMNMILPDFKRPACFGTYVVCYFSEVSCDGDVPDLF
GAAPRYPLMDRFEEVYFRIQDLEMFQPGRMHRVGELSGDNYLRSPGG
RQLRAALDRFRDWQVRCPDWFECENLYSADDQDAPSLDEEVFEEPLL
PPGTGIVKRAPLVREPGSQACLAIDPLVGEEGGAAVAKLEPHLQPRG
QPAPQPLHTLVLAAEEGALVAAVEPGPLADGAAVRLALAGEGEACPL
LGSPGAGRNSVLFLPVDPEDSPLGSSTPMASPDLLPEDVREHLEGLM
LSLFEQSLSCQAQGGCSRPAMVLTDPHTPYEEEQRQSVQSDQGYISR
SSPQPPEGLTEMEEEEEEEQDPGKPALPLSPEDLESLRSLQRQLLFR
QLQKNSGWDTMGSESEGPSA

[0073] The terms “IL-17R binding molecule”, “IL-17R binding protein”, “anti-IL-17R single domain antibody” or “anti-IL-17R antibody” all refer to a molecule capable of binding to/directed to the IL-17RA antigen. Thus, unless otherwise stated, the term human IL-17R refers to human IL-17RA. The binding reaction may be shown by standard methods (qualitative assays) including, for example, a binding assay, competition assay or a bioassay for determining the inhibition of IL-17R binding to its receptor or any kind of binding assays, with reference to a negative control test in which an antibody of unrelated specificity. The term “IL-17R binding molecule” includes an IL-17R binding protein or peptide.

[0074] The invention relates to isolated binding molecules capable of binding to human IL-17RA comprising a heavy chain variable immunoglobulin domain (V_{H}) comprising a CDR3 sequence as shown in any of FIGS. 1 to 7 with reference to tables 1 to 7 or a sequence with at least 70%, at least 80%, at least 90%, or at least 95% homology thereto. In one embodiment, the binding molecule comprises a set of CDR1, 2 and 3 sequences selected from the sets of CDR1, 2 and 3 sequences as shown in any of FIGS. 1 to 7 with reference to tables 1 to 7. In one embodiment, the binding molecule comprises a V_{H} with a set of CDR1, 2 and 3 sequences selected from the sets of CDR1, 2 and 3 sequences as shown in any of FIGS. 1 to 7 with reference to tables 1 to 7. In one embodiment, the binding molecule comprises a heavy chain only antibody.

[0075] In another aspect, the invention relates to an isolated binding molecule comprising at least one immunoglobulin single domain antibody directed against/capable of binding to IL-17RA wherein said domain is a V_{H} domain and wherein said IL-17RA binding molecule comprises at least one antigen binding site.

[0076] In one embodiment, the binding molecule may comprise at least one single domain antibody directed against IL-17RA wherein said domain is a V_{H} domain comprising a CDR3 as shown in any of FIGS. 1 to 7 with reference to tables 1 to 7 or a sequence with at least 60%, at least 70%, at least 80%, at least 90%, or at least 95% homology to said CDR3 or said V_{H}.

[0077] In one embodiment, said at least one single variable heavy chain domain antibody comprises a set of CDR1, 2 and 3 sequences or a V_{H} a set of CDR1, 2 and 3 sequences wherein the CDR sequences are selected from the sets of CDR1, 2 and 3 sequences as shown in any of FIGS. 1 to 7 with reference to tables 1 to 7. In another embodiment, the binding molecules comprises or consists of a V_{H} domain as shown for a clone selected from clones 1.1 to 1.316, 2.1 to 2.125, 3.1 to 3.91, 4.1 to 4.107, 5.1 to 5.4, 6.1 or 7.1.

[0078] In one embodiment of the aspects above, said homology is at least 61%, 62%, 63%, 64%, 65%, 66%, 67%, 68%, 69%, 70%, 71%, 72%, 73%, 74%, 75%, 76%, 77%, 78%, 79%, 80%, 82%, 82%, 83%, 84%, 85%, 86%, 87%, 88%, 89%, 90%, 91%, 92%, 93%, 94%, 95%, 96%, 97%, 98% or 99%.

[0079] “Homology” generally refers to the percentage of amino acid residues in the candidate sequence that are identical with the residues of the polypeptide with which it is compared (sequence identity), after aligning the sequences and in some embodiments after introducing gaps, if necessary, to achieve the maximum percent homology, and not considering any conservative substitutions as part of the sequence identity. Neither N- or C-terminal extensions, tags or insertions shall be construed as reducing identity or homology. Methods and computer programs for the alignment are well known.

[0080] The term “antibody”, broadly refers to any immunoglobulin (Ig) molecule, or antigen binding portion thereof, comprised of four polypeptide chains, two heavy (H) chains and two light (L) chains, or any functional fragment, mutant, variant, or derivation thereof, which retains the essential epitope binding features of an Ig molecule. Such mutant, variant, or derivative antibody formats are known in the art. In a full-length antibody, each heavy chain is comprised of a heavy chain variable region (abbreviated herein as HCVR or V_{H}) and a heavy chain constant region. The heavy chain constant region is comprised of three domains, C_{H}1, C_{H}2 and C_{H}3. Each light chain is comprised of a light chain variable region (abbreviated herein as LCVR or V_{L}) and a light chain constant region. The light chain constant region is comprised of one domain, CL. The V_{H} and V_{L} regions can be further subdivided into regions of hypervariability, termed complementarity determining regions (CDR), interspersed with regions that are more conserved, termed framework regions (FR). Each V_{H} and V_{L} is composed of three CDRs and four FRs, arranged from amino-terminus to carboxy terminus in the following order: FR1, CDR1, FR2, CDR2, FR3, CDR3, FR4. Immunoglobulin molecules can be of any type (e.g., IgG, IgE, IgM, IgD, IgA and IgY), class (e.g., IgG 1, IgG2, IgG 3, IgG4, IgA1 and IgA2) or subclass.

[0081] In certain embodiments, the binding molecules of the invention comprise or consist of at least one single domain antibody wherein said domain is a V_{H} immunoglobulin domain. Thus, the binding molecules of the invention comprise or consist of at least one immunoglobulin single variable heavy chain domain antibody (sVD, sdAb or ISV) that has a V_{H} domain, but is devoid of a V_{L} domain. Single domain antibodies have been described in the art; they are antibodies whose complementary determining regions are part of a single domain polypeptide, for example a V_{H} polypeptide.

[0082] As described further herein, the binding molecule may comprise two or more V_{H} domains. Such binding molecules may be monospecific or multispecific.

[0083] Binding molecules that comprise a single domain antibody wherein said domain is a V_{H} domain are also termed Humabody® V_{H}.

[0084] Thus, in some embodiments the binding molecule does not comprise a light chain. In some embodiments the binding molecule does not comprise heavy chain domains C_{H}2 and C_{H}3. In some embodiments the binding molecule does not comprise a hinge region and heavy chain domains C_{H}2 and C_{H}3. In some embodiments the binding molecule does not comprise heavy chain domains C_{H}1, C_{H}2, and CH3. In some embodiments the binding molecule does not comprise heavy chain domain C_{H}1, a hinge region heavy chain domain C_{H}2 and heavy chain domain C_{H}3. In preferred embodiments the binding molecule does not comprise a light chain, a heavy chain domain C_{H}1, a hinge region heavy chain domain C_{H}2 and heavy chain domain C_{H}3.

[0085] Each V_{H} domain comprises three CDRs and four FRs, arranged from amino-terminus to carboxy-terminus in the following order: FR1, CDR1, FR2, CDR2, FR3, CDR3, FR4. For example, the V_{H} domain may comprise C or N terminal extensions. In one embodiment, the V_{H} domain comprises C terminal extensions of from 1 to 10, for example 1, 2, 3, 4, 5, 6, 7, 8, 9 or 10 additional amino acids. In one embodiment, the V_{H} domain comprises C terminal extensions of from 1 to 12, for example 1, 2, 3, 4, 5, 6, 7, 8, 9 or 10 additional amino acids of the C_{H}1 domain. In one embodiment, said extension comprises at least 1 alanine residue, for example a single alanine residue, a pair of alanine residues or a triplet of alanine residues. Such extended V_{H} domains are within the scope of the invention. Also within the scope of the invention are V_{H} domains that comprise additional C or N terminal residues, for example linker residues introduced from the expression vector used or His tags, e.g. hexa-His (HHHHHH, SEQ ID NO: 2605).

[0086] Preferably, the one or more V_{H} domain is a human V_{H} domain. As used herein, a human V_{H} domain includes a V_{H} domain that is derived from or based on a human V_{H} domain amino acid or nucleic acid sequence. Thus, the term includes variable heavy chain regions derived from human germline immunoglobulin sequences. As used herein, the term human V_{H} domain includes V_{H} domains that are isolated from transgenic mice expressing human immunoglobulin V genes, in particular in response to an immunisation with an antigen of interest. The human V_{H} domains of the invention may include amino acid residues not encoded by human germline immunoglobulin sequences (e.g., mutations introduced in vitro, e.g. by random or site-specific mutagenesis, or introduced by somatic mutation in vivo). The term “human V_{H} domain” therefore also includes modified human V_{H} sequences.

[0087] Thus, the invention provides a binding molecule comprising at least one immunoglobulin single domain antibody capable of binding/directed against IL-17RA wherein said domain is a human V_{H} domain and wherein said IL-17A binding molecule comprises at least one antigen binding site. The single domain antibody is specifically directed against/capable of binding human IL-17RA.

[0088] As used herein, the term V_{H} or “variable domain” refers to immunoglobulin variable domains defined by Kabat et al., Sequences of Immunological Interest, 5^{th} ed., U.S. Dept. Health & Human Services, Washington, D.C. (1991). The numbering and positioning of CDR amino acid residues within the variable domains is in accordance with the well-known Kabat numbering convention.

[0089] More particularly, the invention provides a V_{H} immunoglobulin domain that can bind to human IL-17RA with an affinity, a Kon-rate, a Koff rate, KD and/or KA as further described herein.

[0090] The binding molecules of the invention comprise amino acid sequences and preferred sequences and/or parts thereof, such as CDRs, as defined herein.

[0091] The term “CDR” refers to the complementarity-determining region within antibody variable sequences. There are three CDRs in each of the variable regions of the heavy chain and the light chain, which are designated CDR1, CDR2 and CDR3, for each of the variable regions. The term “CDR set” refers to a group of three CDRs that occur in a single variable region capable of binding the antigen. The exact boundaries of these CDRs have been defined differently according to different systems. The system described by Kabat as used herein. The terms “Kabat numbering”, “Kabat definitions” and “Kabat labeling” are used interchangeably herein. These terms, which are recognized in the art, refer to a system of numbering amino acid residues which are more variable (i.e., hypervariable) than other amino acid residues in the heavy and light chain variable regions of an antibody, or an antigen binding portion thereof (Kabat et al. (1971) Ann. NY Acad. Sci. 190:382-391 and Kabat, et al. (1991) Sequences of Proteins of Immunological Interest, Fifth Edition, U.S. Department of Health and Human Services, NIH Publication No. 91-3242).

[0092] As described in more detail in the experimental part, the inventors isolated parent molecules (resulting in 7 families of clones: done 1.1 is the parent done for family 1 as shown in FIG. 1, clone 2.1 is the parent clone for family 2 as shown in FIG. 2, done 3.1 is the parent clone for family 3 as shown in FIG. 3, done 4.1 is the parent done for family 4 as shown in FIG. 4, done 5.1 is the parent done for family 5 as shown in FIG. 5, clone 6.1 is the parent clone for family 6 as shown in FIG. 6 and done 7.1 is the parent clone for family 7 as shown in FIG. 7); each having a set of CDR sequences (CDR1, 2 and 3) as shown in FIGS. 1, 2, 3, 4, 5, 6 and 7. Through a process of optimization, a panel of clones with CDR3 sequences derived from the parent CDR3 sequences was generated for each of family 1, 2, 3, 4, 5, 6 and 7. Optimised V_{H} domain sequences show improved affinities to IL-17RA and improved potencies in the IL-17RA cell-based assay compared to the parent molecule as shown in the examples.

[0093] In one aspect, the invention relates to a binding molecule capable of binding human IL-17RA comprising a human V_{H} domain wherein said V_{H} domain comprises a family 1 or family 1-like sequence.

[0094] In one embodiment, the binding molecule comprises or consists of at least one immunoglobulin single domain antibody capable of binding/directed against IL-17RA, preferably human IL-17RA, wherein said domain is a human V_{H} domain and wherein said V_{H} domain comprises a family 1 or family 1-like sequence. These include the V_{H} sequence of the parent clone (clone 1.1) or a part thereof, for example a CDR3 sequence and V_{H} sequences of clones or parts thereof that are derived from the parent clone 1.1 through a process of optimization, for example sequences as shown as shown in FIG. 1. CDR sequences and full length sequences of clones in family 1 are numbered according to table 1 as shown below.

TABLE 1
This shows SEQ ID NOs. of family 1 CDR sequences and of family
1 full-length V_{H} sequences that are within the scope of the
invention. Corresponding sequences are shown in FIG. 1.

| Clone | | | | VH FULL LENGTH |
|---|---|---|---|---|
| name | CDR1 SEQ ID NO. | CDR2 SEQ ID NO. | CDR3 SEQ ID NO. | SEQ ID NO. |
| 1.1 | SEQ ID NO. 1 | SEQ ID NO. 2 | SEQ ID NO. 3 | SEQ ID NO. 4 |
| 1.2 | SEQ ID NO. 5 | SEQ ID NO. 6 | SEQ ID NO. 7 | SEQ ID NO. 8 |
| 1.3 | SEQ ID NO. 9 | SEQ ID NO. 10 | SEQ ID NO. 11 | SEQ ID NO. 12 |
| 1.4 | SEQ ID NO. 13 | SEQ ID NO. 14 | SEQ ID NO. 15 | SEQ ID NO. 16 |
| 1.5 | SEQ ID NO. 17 | SEQ ID NO. 18 | SEQ ID NO. 19 | SEQ ID NO. 20 |
| 1.6 | SEQ ID NO. 21 | SEQ ID NO. 22 | SEQ ID NO. 23 | SEQ ID NO. 24 |
| 1.7 | SEQ ID NO. 25 | SEQ ID NO. 26 | SEQ ID NO. 27 | SEQ ID NO. 28 |
| 1.8 | SEQ ID NO. 29 | SEQ ID NO. 30 | SEQ ID NO. 31 | SEQ ID NO. 32 |
| 1.9 | SEQ ID NO. 33 | SEQ ID NO. 34 | SEQ ID NO. 35 | SEQ ID NO. 36 |
| 1.10 | SEQ ID NO. 37 | SEQ ID NO. 38 | SEQ ID NO. 39 | SEQ ID NO. 40 |
| 1.11 | SEQ ID NO. 41 | SEQ ID NO. 42 | SEQ ID NO. 43 | SEQ ID NO. 44 |
| 1.12 | SEQ ID NO. 45 | SEQ ID NO. 46 | SEQ ID NO. 47 | SEQ ID NO. 48 |
| 1.13 | SEQ ID NO. 49 | SEQ ID NO. 50 | SEQ ID NO. 51 | SEQ ID NO. 52 |
| 1.14 | SEQ ID NO. 53 | SEQ ID NO. 54 | SEQ ID NO. 55 | SEQ ID NO. 56 |
| 1.15 | SEQ ID NO. 57 | SEQ ID NO. 58 | SEQ ID NO. 59 | SEQ ID NO. 60 |
| 1.16 | SEQ ID NO. 61 | SEQ ID NO. 62 | SEQ ID NO. 63 | SEQ ID NO. 64 |
| 1.17 | SEQ ID NO. 65 | SEQ ID NO. 66 | SEQ ID NO. 67 | SEQ ID NO. 68 |
| 1.18 | SEQ ID NO. 69 | SEQ ID NO. 70 | SEQ ID NO. 71 | SEQ ID NO. 72 |
| 1.19 | SEQ ID NO. 73 | SEQ ID NO. 74 | SEQ ID NO. 75 | SEQ ID NO. 76 |
| 1.20 | SEQ ID NO. 77 | SEQ ID NO. 78 | SEQ ID NO. 79 | SEQ ID NO. 80 |
| 1.21 | SEQ ID NO. 81 | SEQ ID NO. 82 | SEQ ID NO. 83 | SEQ ID NO. 84 |
| 1.22 | SEQ ID NO. 85 | SEQ ID NO. 86 | SEQ ID NO. 87 | SEQ ID NO. 88 |
| 1.23 | SEQ ID NO. 89 | SEQ ID NO. 90 | SEQ ID NO. 91 | SEQ ID NO. 92 |
| 1.24 | SEQ ID NO. 93 | SEQ ID NO. 94 | SEQ ID NO. 95 | SEQ ID NO. 96 |
| 1.25 | SEQ ID NO. 97 | SEQ ID NO. 98 | SEQ ID NO. 99 | SEQ ID NO. 100 |
| 1.26 | SEQ ID NO. 101 | SEQ ID NO. 102 | SEQ ID NO. 103 | SEQ ID NO. 104 |
| 1.27 | SEQ ID NO. 105 | SEQ ID NO. 106 | SEQ ID NO. 107 | SEQ ID NO. 108 |
| 1.28 | SEQ ID NO. 109 | SEQ ID NO. 110 | SEQ ID NO. 111 | SEQ ID NO. 112 |
| 1.29 | SEQ ID NO. 113 | SEQ ID NO. 114 | SEQ ID NO. 115 | SEQ ID NO. 116 |
| 1.30 | SEQ ID NO. 117 | SEQ ID NO. 118 | SEQ ID NO. 119 | SEQ ID NO. 120 |
| 1.31 | SEQ ID NO. 121 | SEQ ID NO. 122 | SEQ ID NO. 123 | SEQ ID NO. 124 |
| 1.32 | SEQ ID NO. 125 | SEQ ID NO. 126 | SEQ ID NO. 127 | SEQ ID NO. 128 |
| 1.33 | SEQ ID NO. 129 | SEQ ID NO. 130 | SEQ ID NO. 131 | SEQ ID NO. 132 |
| 1.34 | SEQ ID NO. 133 | SEQ ID NO. 134 | SEQ ID NO. 135 | SEQ ID NO. 136 |
| 1.35 | SEQ ID NO. 137 | SEQ ID NO. 138 | SEQ ID NO. 139 | SEQ ID NO. 140 |
| 1.36 | SEQ ID NO. 141 | SEQ ID NO. 142 | SEQ ID NO. 143 | SEQ ID NO. 144 |
| 1.37 | SEQ ID NO. 145 | SEQ ID NO. 146 | SEQ ID NO. 147 | SEQ ID NO. 148 |
| 1.38 | SEQ ID NO. 149 | SEQ ID NO. 150 | SEQ ID NO. 151 | SEQ ID NO. 152 |
| 1.39 | SEQ ID NO. 153 | SEQ ID NO. 154 | SEQ ID NO. 155 | SEQ ID NO. 156 |
| 1.40 | SEQ ID NO. 157 | SEQ ID NO. 158 | SEQ ID NO. 159 | SEQ ID NO. 160 |
| 1.41 | SEQ ID NO. 161 | SEQ ID NO. 162 | SEQ ID NO. 163 | SEQ ID NO. 164 |
| 1.42 | SEQ ID NO. 165 | SEQ ID NO. 166 | SEQ ID NO. 167 | SEQ ID NO. 168 |
| 1.43 | SEQ ID NO. 169 | SEQ ID NO. 170 | SEQ ID NO. 171 | SEQ ID NO. 172 |
| 1.44 | SEQ ID NO. 173 | SEQ ID NO. 174 | SEQ ID NO. 175 | SEQ ID NO. 176 |
| 1.45 | SEQ ID NO. 177 | SEQ ID NO. 178 | SEQ ID NO. 179 | SEQ ID NO. 180 |
| 1.46 | SEQ ID NO. 181 | SEQ ID NO. 182 | SEQ ID NO. 183 | SEQ ID NO. 184 |
| 1.47 | SEQ ID NO. 185 | SEQ ID NO. 186 | SEQ ID NO. 187 | SEQ ID NO. 188 |
| 1.48 | SEQ ID NO. 189 | SEQ ID NO. 190 | SEQ ID NO. 191 | SEQ ID NO. 192 |
| 1.49 | SEQ ID NO. 193 | SEQ ID NO. 194 | SEQ ID NO. 195 | SEQ ID NO. 196 |
| 1.50 | SEQ ID NO. 197 | SEQ ID NO. 198 | SEQ ID NO. 199 | SEQ ID NO. 200 |
| 1.51 | SEQ ID NO. 201 | SEQ ID NO. 202 | SEQ ID NO. 203 | SEQ ID NO. 204 |
| 1.52 | SEQ ID NO. 205 | SEQ ID NO. 206 | SEQ ID NO. 207 | SEQ ID NO. 208 |
| 1.53 | SEQ ID NO. 209 | SEQ ID NO. 210 | SEQ ID NO. 211 | SEQ ID NO. 212 |
| 1.54 | SEQ ID NO. 213 | SEQ ID NO. 214 | SEQ ID NO. 215 | SEQ ID NO. 216 |
| 1.55 | SEQ ID NO. 217 | SEQ ID NO. 218 | SEQ ID NO. 219 | SEQ ID NO. 220 |
| 1.56 | SEQ ID NO. 221 | SEQ ID NO. 222 | SEQ ID NO. 223 | SEQ ID NO. 224 |
| 1.57 | SEQ ID NO. 225 | SEQ ID NO. 226 | SEQ ID NO. 227 | SEQ ID NO. 228 |
| 1.58 | SEQ ID NO. 229 | SEQ ID NO. 230 | SEQ ID NO. 231 | SEQ ID NO. 232 |
| 1.59 | SEQ ID NO. 233 | SEQ ID NO. 234 | SEQ ID NO. 235 | SEQ ID NO. 236 |
| 1.60 | SEQ ID NO. 237 | SEQ ID NO. 238 | SEQ ID NO. 239 | SEQ ID NO. 240 |
| 1.61 | SEQ ID NO. 241 | SEQ ID NO. 242 | SEQ ID NO. 243 | SEQ ID NO. 244 |
| 1.62 | SEQ ID NO. 245 | SEQ ID NO. 246 | SEQ ID NO. 247 | SEQ ID NO. 248 |
| 1.63 | SEQ ID NO. 249 | SEQ ID NO. 250 | SEQ ID NO. 251 | SEQ ID NO. 252 |
| 1.64 | SEQ ID NO. 253 | SEQ ID NO. 254 | SEQ ID NO. 255 | SEQ ID NO. 256 |
| 1.65 | SEQ ID NO. 257 | SEQ ID NO. 258 | SEQ ID NO. 259 | SEQ ID NO. 260 |
| 1.66 | SEQ ID NO. 261 | SEQ ID NO. 262 | SEQ ID NO. 263 | SEQ ID NO. 264 |
| 1.67 | SEQ ID NO. 265 | SEQ ID NO. 266 | SEQ ID NO. 267 | SEQ ID NO. 268 |
| 1.68 | SEQ ID NO. 269 | SEQ ID NO. 270 | SEQ ID NO. 271 | SEQ ID NO. 272 |
| 1.69 | SEQ ID NO. 273 | SEQ ID NO. 274 | SEQ ID NO. 275 | SEQ ID NO. 276 |
| 1.70 | SEQ ID NO. 277 | SEQ ID NO. 278 | SEQ ID NO. 279 | SEQ ID NO. 280 |
| 1.71 | SEQ ID NO. 281 | SEQ ID NO. 282 | SEQ ID NO. 283 | SEQ ID NO. 284 |
| 1.72 | SEQ ID NO. 285 | SEQ ID NO. 286 | SEQ ID NO. 287 | SEQ ID NO. 288 |
| 1.73 | SEQ ID NO. 289 | SEQ ID NO. 290 | SEQ ID NO. 291 | SEQ ID NO. 292 |
| 1.74 | SEQ ID NO. 293 | SEQ ID NO. 294 | SEQ ID NO. 295 | SEQ ID NO. 296 |
| 1.75 | SEQ ID NO. 297 | SEQ ID NO. 298 | SEQ ID NO. 299 | SEQ ID NO. 300 |
| 1.76 | SEQ ID NO. 301 | SEQ ID NO. 302 | SEQ ID NO. 303 | SEQ ID NO. 304 |
| 1.77 | SEQ ID NO. 305 | SEQ ID NO. 306 | SEQ ID NO. 307 | SEQ ID NO. 308 |
| 1.78 | SEQ ID NO. 309 | SEQ ID NO. 310 | SEQ ID NO. 311 | SEQ ID NO. 312 |
| 1.79 | SEQ ID NO. 313 | SEQ ID NO. 314 | SEQ ID NO. 315 | SEQ ID NO. 316 |
| 1.80 | SEQ ID NO. 317 | SEQ ID NO. 318 | SEQ ID NO. 319 | SEQ ID NO. 320 |
| 1.81 | SEQ ID NO. 321 | SEQ ID NO. 322 | SEQ ID NO. 323 | SEQ ID NO. 324 |
| 1.82 | SEQ ID NO. 325 | SEQ ID NO. 326 | SEQ ID NO. 327 | SEQ ID NO. 328 |
| 1.83 | SEQ ID NO. 329 | SEQ ID NO. 330 | SEQ ID NO. 331 | SEQ ID NO. 332 |
| 1.84 | SEQ ID NO. 333 | SEQ ID NO. 334 | SEQ ID NO. 335 | SEQ ID NO. 336 |
| 1.85 | SEQ ID NO. 337 | SEQ ID NO. 338 | SEQ ID NO. 339 | SEQ ID NO. 340 |
| 1.86 | SEQ ID NO. 341 | SEQ ID NO. 342 | SEQ ID NO. 343 | SEQ ID NO. 344 |
| 1.87 | SEQ ID NO. 345 | SEQ ID NO. 346 | SEQ ID NO. 347 | SEQ ID NO. 348 |
| 1.88 | SEQ ID NO. 349 | SEQ ID NO. 350 | SEQ ID NO. 351 | SEQ ID NO. 352 |
| 1.89 | SEQ ID NO. 353 | SEQ ID NO. 354 | SEQ ID NO. 355 | SEQ ID NO. 356 |
| 1.90 | SEQ ID NO. 357 | SEQ ID NO. 358 | SEQ ID NO. 359 | SEQ ID NO. 360 |
| 1.91 | SEQ ID NO. 361 | SEQ ID NO. 362 | SEQ ID NO. 363 | SEQ ID NO. 364 |
| 1.92 | SEQ ID NO. 365 | SEQ ID NO. 366 | SEQ ID NO. 367 | SEQ ID NO. 368 |
| 1.93 | SEQ ID NO. 369 | SEQ ID NO. 370 | SEQ ID NO. 371 | SEQ ID NO. 372 |
| 1.94 | SEQ ID NO. 373 | SEQ ID NO. 374 | SEQ ID NO. 375 | SEQ ID NO. 376 |
| 1.95 | SEQ ID NO. 377 | SEQ ID NO. 378 | SEQ ID NO. 379 | SEQ ID NO. 380 |
| 1.96 | SEQ ID NO. 381 | SEQ ID NO. 382 | SEQ ID NO. 383 | SEQ ID NO. 384 |
| 1.97 | SEQ ID NO. 385 | SEQ ID NO. 386 | SEQ ID NO. 387 | SEQ ID NO. 388 |
| 1.98 | SEQ ID NO. 389 | SEQ ID NO. 390 | SEQ ID NO. 391 | SEQ ID NO. 392 |
| 1.99 | SEQ ID NO. 393 | SEQ ID NO. 394 | SEQ ID NO. 395 | SEQ ID NO. 396 |
| 1.100 | SEQ ID NO. 397 | SEQ ID NO. 398 | SEQ ID NO. 399 | SEQ ID NO. 400 |
| 1.101 | SEQ ID NO. 401 | SEQ ID NO. 402 | SEQ ID NO. 403 | SEQ ID NO. 404 |
| 1.102 | SEQ ID NO. 405 | SEQ ID NO. 406 | SEQ ID NO. 407 | SEQ ID NO. 408 |
| 1.103 | SEQ ID NO. 409 | SEQ ID NO. 410 | SEQ ID NO. 411 | SEQ ID NO. 412 |
| 1.104 | SEQ ID NO. 413 | SEQ ID NO. 414 | SEQ ID NO. 415 | SEQ ID NO. 416 |
| 1.105 | SEQ ID NO. 417 | SEQ ID NO. 418 | SEQ ID NO. 419 | SEQ ID NO. 420 |
| 1.106 | SEQ ID NO. 421 | SEQ ID NO. 422 | SEQ ID NO. 423 | SEQ ID NO. 424 |
| 1.107 | SEQ ID NO. 425 | SEQ ID NO. 426 | SEQ ID NO. 427 | SEQ ID NO. 428 |
| 1.108 | SEQ ID NO. 429 | SEQ ID NO. 430 | SEQ ID NO. 431 | SEQ ID NO. 432 |
| 1.109 | SEQ ID NO. 433 | SEQ ID NO. 434 | SEQ ID NO. 435 | SEQ ID NO. 436 |
| 1.110 | SEQ ID NO. 437 | SEQ ID NO. 438 | SEQ ID NO. 439 | SEQ ID NO. 440 |
| 1.111 | SEQ ID NO. 441 | SEQ ID NO. 442 | SEQ ID NO. 443 | SEQ ID NO. 444 |
| 1.112 | SEQ ID NO. 445 | SEQ ID NO. 446 | SEQ ID NO. 447 | SEQ ID NO. 448 |
| 1.113 | SEQ ID NO. 449 | SEQ ID NO. 450 | SEQ ID NO. 451 | SEQ ID NO. 452 |
| 1.114 | SEQ ID NO. 453 | SEQ ID NO. 454 | SEQ ID NO. 455 | SEQ ID NO. 456 |
| 1.115 | SEQ ID NO. 457 | SEQ ID NO. 458 | SEQ ID NO. 459 | SEQ ID NO. 460 |
| 1.116 | SEQ ID NO. 461 | SEQ ID NO. 462 | SEQ ID NO. 463 | SEQ ID NO. 464 |
| 1.117 | SEQ ID NO. 465 | SEQ ID NO. 466 | SEQ ID NO. 467 | SEQ ID NO. 468 |
| 1.118 | SEQ ID NO. 469 | SEQ ID NO. 470 | SEQ ID NO. 471 | SEQ ID NO. 472 |
| 1.119 | SEQ ID NO. 473 | SEQ ID NO. 474 | SEQ ID NO. 475 | SEQ ID NO. 476 |
| 1.120 | SEQ ID NO. 477 | SEQ ID NO. 478 | SEQ ID NO. 479 | SEQ ID NO. 480 |
| 1.121 | SEQ ID NO. 481 | SEQ ID NO. 482 | SEQ ID NO. 483 | SEQ ID NO. 484 |
| 1.122 | SEQ ID NO. 485 | SEQ ID NO. 486 | SEQ ID NO. 487 | SEQ ID NO. 488 |
| 1.123 | SEQ ID NO. 489 | SEQ ID NO. 490 | SEQ ID NO. 491 | SEQ ID NO. 492 |
| 1.124 | SEQ ID NO. 493 | SEQ ID NO. 494 | SEQ ID NO. 495 | SEQ ID NO. 496 |
| 1.125 | SEQ ID NO. 497 | SEQ ID NO. 498 | SEQ ID NO. 499 | SEQ ID NO. 500 |
| 1.126 | SEQ ID NO. 501 | SEQ ID NO. 502 | SEQ ID NO. 503 | SEQ ID NO. 504 |
| 1.127 | SEQ ID NO. 505 | SEQ ID NO. 506 | SEQ ID NO. 507 | SEQ ID NO. 508 |
| 1.128 | SEQ ID NO. 509 | SEQ ID NO. 510 | SEQ ID NO. 511 | SEQ ID NO. 512 |
| 1.129 | SEQ ID NO. 513 | SEQ ID NO. 514 | SEQ ID NO. 515 | SEQ ID NO. 516 |
| 1.130 | SEQ ID NO. 517 | SEQ ID NO. 518 | SEQ ID NO. 519 | SEQ ID NO. 520 |
| 1.131 | SEQ ID NO. 521 | SEQ ID NO. 522 | SEQ ID NO. 523 | SEQ ID NO. 524 |
| 1.132 | SEQ ID NO. 525 | SEQ ID NO. 526 | SEQ ID NO. 527 | SEQ ID NO. 528 |
| 1.133 | SEQ ID NO. 529 | SEQ ID NO. 530 | SEQ ID NO. 531 | SEQ ID NO. 532 |
| 1.134 | SEQ ID NO. 533 | SEQ ID NO. 534 | SEQ ID NO. 535 | SEQ ID NO. 536 |
| 1.135 | SEQ ID NO. 537 | SEQ ID NO. 538 | SEQ ID NO. 539 | SEQ ID NO. 540 |
| 1.136 | SEQ ID NO. 541 | SEQ ID NO. 542 | SEQ ID NO. 543 | SEQ ID NO. 544 |
| 1.137 | SEQ ID NO. 545 | SEQ ID NO. 546 | SEQ ID NO. 547 | SEQ ID NO. 548 |
| 1.138 | SEQ ID NO. 549 | SEQ ID NO. 550 | SEQ ID NO. 551 | SEQ ID NO. 552 |
| 1.139 | SEQ ID NO. 553 | SEQ ID NO. 554 | SEQ ID NO. 555 | SEQ ID NO. 556 |
| 1.140 | SEQ ID NO. 557 | SEQ ID NO. 558 | SEQ ID NO. 559 | SEQ ID NO. 560 |
| 1.141 | SEQ ID NO. 561 | SEQ ID NO. 562 | SEQ ID NO. 563 | SEQ ID NO. 564 |
| 1.142 | SEQ ID NO. 565 | SEQ ID NO. 566 | SEQ ID NO. 567 | SEQ ID NO. 568 |
| 1.143 | SEQ ID NO. 569 | SEQ ID NO. 570 | SEQ ID NO. 571 | SEQ ID NO. 572 |
| 1.144 | SEQ ID NO. 573 | SEQ ID NO. 574 | SEQ ID NO. 575 | SEQ ID NO. 576 |
| 1.145 | SEQ ID NO. 577 | SEQ ID NO. 578 | SEQ ID NO. 579 | SEQ ID NO. 580 |
| 1.146 | SEQ ID NO. 581 | SEQ ID NO. 582 | SEQ ID NO. 583 | SEQ ID NO. 584 |
| 1.147 | SEQ ID NO. 585 | SEQ ID NO. 586 | SEQ ID NO. 587 | SEQ ID NO. 588 |
| 1.148 | SEQ ID NO. 589 | SEQ ID NO. 590 | SEQ ID NO. 591 | SEQ ID NO. 592 |
| 1.149 | SEQ ID NO. 593 | SEQ ID NO. 594 | SEQ ID NO. 595 | SEQ ID NO. 596 |
| 1.150 | SEQ ID NO. 597 | SEQ ID NO. 598 | SEQ ID NO. 599 | SEQ ID NO. 600 |
| 1.151 | SEQ ID NO. 601 | SEQ ID NO. 602 | SEQ ID NO. 603 | SEQ ID NO. 604 |
| 1.152 | SEQ ID NO. 605 | SEQ ID NO. 606 | SEQ ID NO. 607 | SEQ ID NO. 608 |
| 1.153 | SEQ ID NO. 609 | SEQ ID NO. 610 | SEQ ID NO. 611 | SEQ ID NO. 612 |
| 1.154 | SEQ ID NO. 613 | SEQ ID NO. 614 | SEQ ID NO. 615 | SEQ ID NO. 616 |
| 1.155 | SEQ ID NO. 617 | SEQ ID NO. 618 | SEQ ID NO. 619 | SEQ ID NO. 620 |
| 1.156 | SEQ ID NO. 621 | SEQ ID NO. 622 | SEQ ID NO. 623 | SEQ ID NO. 624 |
| 1.157 | SEQ ID NO. 625 | SEQ ID NO. 626 | SEQ ID NO. 627 | SEQ ID NO. 628 |
| 1.158 | SEQ ID NO. 629 | SEQ ID NO. 630 | SEQ ID NO. 631 | SEQ ID NO. 632 |
| 1.159 | SEQ ID NO. 633 | SEQ ID NO. 634 | SEQ ID NO. 635 | SEQ ID NO. 636 |
| 1.160 | SEQ ID NO. 637 | SEQ ID NO. 638 | SEQ ID NO. 639 | SEQ ID NO. 640 |
| 1.161 | SEQ ID NO. 641 | SEQ ID NO. 642 | SEQ ID NO. 643 | SEQ ID NO. 644 |
| 1.162 | SEQ ID NO. 645 | SEQ ID NO. 646 | SEQ ID NO. 647 | SEQ ID NO. 648 |
| 1.163 | SEQ ID NO. 649 | SEQ ID NO. 650 | SEQ ID NO. 651 | SEQ ID NO. 652 |
| 1.164 | SEQ ID NO. 653 | SEQ ID NO. 654 | SEQ ID NO. 655 | SEQ ID NO. 656 |
| 1.165 | SEQ ID NO. 657 | SEQ ID NO. 658 | SEQ ID NO. 659 | SEQ ID NO. 660 |
| 1.166 | SEQ ID NO. 661 | SEQ ID NO. 662 | SEQ ID NO. 663 | SEQ ID NO. 664 |
| 1.167 | SEQ ID NO. 665 | SEQ ID NO. 666 | SEQ ID NO. 667 | SEQ ID NO. 668 |
| 1.168 | SEQ ID NO. 669 | SEQ ID NO. 670 | SEQ ID NO. 671 | SEQ ID NO. 672 |
| 1.169 | SEQ ID NO. 673 | SEQ ID NO. 674 | SEQ ID NO. 675 | SEQ ID NO. 676 |
| 1.170 | SEQ ID NO. 677 | SEQ ID NO. 678 | SEQ ID NO. 679 | SEQ ID NO. 680 |
| 1.171 | SEQ ID NO. 681 | SEQ ID NO. 682 | SEQ ID NO. 683 | SEQ ID NO. 684 |
| 1.172 | SEQ ID NO. 685 | SEQ ID NO. 686 | SEQ ID NO. 687 | SEQ ID NO. 688 |
| 1.173 | SEQ ID NO. 689 | SEQ ID NO. 690 | SEQ ID NO. 691 | SEQ ID NO. 692 |
| 1.174 | SEQ ID NO. 693 | SEQ ID NO. 694 | SEQ ID NO. 695 | SEQ ID NO. 696 |
| 1.175 | SEQ ID NO. 697 | SEQ ID NO. 698 | SEQ ID NO. 699 | SEQ ID NO. 700 |
| 1.176 | SEQ ID NO. 701 | SEQ ID NO. 702 | SEQ ID NO. 703 | SEQ ID NO. 704 |
| 1.177 | SEQ ID NO. 705 | SEQ ID NO. 706 | SEQ ID NO. 707 | SEQ ID NO. 708 |
| 1.178 | SEQ ID NO. 709 | SEQ ID NO. 710 | SEQ ID NO. 711 | SEQ ID NO. 712 |
| 1.179 | SEQ ID NO. 713 | SEQ ID NO. 714 | SEQ ID NO. 715 | SEQ ID NO. 716 |
| 1.180 | SEQ ID NO. 717 | SEQ ID NO. 718 | SEQ ID NO. 719 | SEQ ID NO. 720 |
| 1.181 | SEQ ID NO. 721 | SEQ ID NO. 722 | SEQ ID NO. 723 | SEQ ID NO. 724 |
| 1.182 | SEQ ID NO. 725 | SEQ ID NO. 726 | SEQ ID NO. 727 | SEQ ID NO. 728 |
| 1.183 | SEQ ID NO. 729 | SEQ ID NO. 730 | SEQ ID NO. 731 | SEQ ID NO. 732 |
| 1.184 | SEQ ID NO. 733 | SEQ ID NO. 734 | SEQ ID NO. 735 | SEQ ID NO. 736 |
| 1.185 | SEQ ID NO. 737 | SEQ ID NO. 738 | SEQ ID NO. 739 | SEQ ID NO. 740 |
| 1.186 | SEQ ID NO. 741 | SEQ ID NO. 742 | SEQ ID NO. 743 | SEQ ID NO. 744 |
| 1.187 | SEQ ID NO. 745 | SEQ ID NO. 746 | SEQ ID NO. 747 | SEQ ID NO. 748 |
| 1.188 | SEQ ID NO. 749 | SEQ ID NO. 750 | SEQ ID NO. 751 | SEQ ID NO. 752 |
| 1.189 | SEQ ID NO. 753 | SEQ ID NO. 754 | SEQ ID NO. 755 | SEQ ID NO. 756 |
| 1.190 | SEQ ID NO. 757 | SEQ ID NO. 758 | SEQ ID NO. 759 | SEQ ID NO. 760 |
| 1.191 | SEQ ID NO. 761 | SEQ ID NO. 762 | SEQ ID NO. 763 | SEQ ID NO. 764 |
| 1.192 | SEQ ID NO. 765 | SEQ ID NO. 766 | SEQ ID NO. 767 | SEQ ID NO. 768 |
| 1.193 | SEQ ID NO. 769 | SEQ ID NO. 770 | SEQ ID NO. 771 | SEQ ID NO. 772 |
| 1.194 | SEQ ID NO. 773 | SEQ ID NO. 774 | SEQ ID NO. 775 | SEQ ID NO. 776 |
| 1.195 | SEQ ID NO. 777 | SEQ ID NO. 778 | SEQ ID NO. 779 | SEQ ID NO. 780 |
| 1.196 | SEQ ID NO. 781 | SEQ ID NO. 782 | SEQ ID NO. 783 | SEQ ID NO. 784 |
| 1.197 | SEQ ID NO. 785 | SEQ ID NO. 786 | SEQ ID NO. 787 | SEQ ID NO. 788 |
| 1.198 | SEQ ID NO. 789 | SEQ ID NO. 790 | SEQ ID NO. 791 | SEQ ID NO. 792 |
| 1.199 | SEQ ID NO. 793 | SEQ ID NO. 794 | SEQ ID NO. 795 | SEQ ID NO. 796 |
| 1.200 | SEQ ID NO. 797 | SEQ ID NO. 798 | SEQ ID NO. 799 | SEQ ID NO. 800 |
| 1.201 | SEQ ID NO. 801 | SEQ ID NO. 802 | SEQ ID NO. 803 | SEQ ID NO. 804 |
| 1.202 | SEQ ID NO. 805 | SEQ ID NO. 806 | SEQ ID NO. 807 | SEQ ID NO. 808 |
| 1.203 | SEQ ID NO. 809 | SEQ ID NO. 810 | SEQ ID NO. 811 | SEQ ID NO. 812 |
| 1.204 | SEQ ID NO. 813 | SEQ ID NO. 814 | SEQ ID NO. 815 | SEQ ID NO. 816 |
| 1.205 | SEQ ID NO. 817 | SEQ ID NO. 818 | SEQ ID NO. 819 | SEQ ID NO. 820 |
| 1.206 | SEQ ID NO. 821 | SEQ ID NO. 822 | SEQ ID NO. 823 | SEQ ID NO. 824 |
| 1.207 | SEQ ID NO. 825 | SEQ ID NO. 826 | SEQ ID NO. 827 | SEQ ID NO. 828 |
| 1.208 | SEQ ID NO. 829 | SEQ ID NO. 830 | SEQ ID NO. 831 | SEQ ID NO. 832 |
| 1.209 | SEQ ID NO. 833 | SEQ ID NO. 834 | SEQ ID NO. 835 | SEQ ID NO. 836 |
| 1.210 | SEQ ID NO. 837 | SEQ ID NO. 838 | SEQ ID NO. 839 | SEQ ID NO. 840 |
| 1.211 | SEQ ID NO. 841 | SEQ ID NO. 842 | SEQ ID NO. 843 | SEQ ID NO. 844 |
| 1.212 | SEQ ID NO. 845 | SEQ ID NO. 846 | SEQ ID NO. 847 | SEQ ID NO. 848 |
| 1.213 | SEQ ID NO. 849 | SEQ ID NO. 850 | SEQ ID NO. 851 | SEQ ID NO. 852 |
| 1.214 | SEQ ID NO. 853 | SEQ ID NO. 854 | SEQ ID NO. 855 | SEQ ID NO. 856 |
| 1.215 | SEQ ID NO. 857 | SEQ ID NO. 858 | SEQ ID NO. 859 | SEQ ID NO. 860 |
| 1.216 | SEQ ID NO. 861 | SEQ ID NO. 862 | SEQ ID NO. 863 | SEQ ID NO. 864 |
| 1.217 | SEQ ID NO. 865 | SEQ ID NO. 866 | SEQ ID NO. 867 | SEQ ID NO. 868 |
| 1.218 | SEQ ID NO. 869 | SEQ ID NO. 870 | SEQ ID NO. 871 | SEQ ID NO. 872 |
| 1.219 | SEQ ID NO. 873 | SEQ ID NO. 874 | SEQ ID NO. 875 | SEQ ID NO. 876 |
| 1.220 | SEQ ID NO. 877 | SEQ ID NO. 878 | SEQ ID NO. 879 | SEQ ID NO. 880 |
| 1.221 | SEQ ID NO. 881 | SEQ ID NO. 882 | SEQ ID NO. 883 | SEQ ID NO. 884 |
| 1.222 | SEQ ID NO. 885 | SEQ ID NO. 886 | SEQ ID NO. 887 | SEQ ID NO. 888 |
| 1.223 | SEQ ID NO. 889 | SEQ ID NO. 890 | SEQ ID NO. 891 | SEQ ID NO. 892 |
| 1.224 | SEQ ID NO. 893 | SEQ ID NO. 894 | SEQ ID NO. 895 | SEQ ID NO. 896 |
| 1.225 | SEQ ID NO. 897 | SEQ ID NO. 898 | SEQ ID NO. 899 | SEQ ID NO. 900 |
| 1.226 | SEQ ID NO. 901 | SEQ ID NO. 902 | SEQ ID NO. 903 | SEQ ID NO. 904 |
| 1.227 | SEQ ID NO. 905 | SEQ ID NO. 906 | SEQ ID NO. 907 | SEQ ID NO. 908 |
| 1.228 | SEQ ID NO. 909 | SEQ ID NO. 910 | SEQ ID NO. 911 | SEQ ID NO. 912 |
| 1.229 | SEQ ID NO. 913 | SEQ ID NO. 914 | SEQ ID NO. 915 | SEQ ID NO. 916 |
| 1.230 | SEQ ID NO. 917 | SEQ ID NO. 918 | SEQ ID NO. 919 | SEQ ID NO. 920 |
| 1.231 | SEQ ID NO. 921 | SEQ ID NO. 922 | SEQ ID NO. 923 | SEQ ID NO. 924 |
| 1.232 | SEQ ID NO. 925 | SEQ ID NO. 926 | SEQ ID NO. 927 | SEQ ID NO. 928 |
| 1.233 | SEQ ID NO. 929 | SEQ ID NO. 930 | SEQ ID NO. 931 | SEQ ID NO. 932 |
| 1.234 | SEQ ID NO. 933 | SEQ ID NO. 934 | SEQ ID NO. 935 | SEQ ID NO. 936 |
| 1.235 | SEQ ID NO. 937 | SEQ ID NO. 938 | SEQ ID NO. 939 | SEQ ID NO. 940 |
| 1.236 | SEQ ID NO. 941 | SEQ ID NO. 942 | SEQ ID NO. 943 | SEQ ID NO. 944 |
| 1.237 | SEQ ID NO. 945 | SEQ ID NO. 946 | SEQ ID NO. 947 | SEQ ID NO. 948 |
| 1.238 | SEQ ID NO. 949 | SEQ ID NO. 950 | SEQ ID NO. 951 | SEQ ID NO. 952 |
| 1.239 | SEQ ID NO. 953 | SEQ ID NO. 954 | SEQ ID NO. 955 | SEQ ID NO. 956 |
| 1.240 | SEQ ID NO. 957 | SEQ ID NO. 958 | SEQ ID NO. 959 | SEQ ID NO. 960 |
| 1.241 | SEQ ID NO. 961 | SEQ ID NO. 962 | SEQ ID NO. 963 | SEQ ID NO. 964 |
| 1.242 | SEQ ID NO. 965 | SEQ ID NO. 966 | SEQ ID NO. 967 | SEQ ID NO. 968 |
| 1.243 | SEQ ID NO. 969 | SEQ ID NO. 970 | SEQ ID NO. 971 | SEQ ID NO. 972 |
| 1.244 | SEQ ID NO. 973 | SEQ ID NO. 974 | SEQ ID NO. 975 | SEQ ID NO. 976 |
| 1.245 | SEQ ID NO. 977 | SEQ ID NO. 978 | SEQ ID NO. 979 | SEQ ID NO. 980 |
| 1.246 | SEQ ID NO. 981 | SEQ ID NO. 982 | SEQ ID NO. 983 | SEQ ID NO. 984 |
| 1.247 | SEQ ID NO. 985 | SEQ ID NO. 986 | SEQ ID NO. 987 | SEQ ID NO. 988 |
| 1.248 | SEQ ID NO. 989 | SEQ ID NO. 990 | SEQ ID NO. 991 | SEQ ID NO. 992 |
| 1.249 | SEQ ID NO. 993 | SEQ ID NO. 994 | SEQ ID NO. 995 | SEQ ID NO. 996 |
| 1.250 | SEQ ID NO. 997 | SEQ ID NO. 998 | SEQ ID NO. 999 | SEQ ID NO. 1000 |
| 1.251 | SEQ ID NO. 1001 | SEQ ID NO. 1002 | SEQ ID NO. 1003 | SEQ ID NO. 1004 |
| 1.252 | SEQ ID NO. 1005 | SEQ ID NO. 1006 | SEQ ID NO. 1007 | SEQ ID NO. 1008 |
| 1.253 | SEQ ID NO. 1009 | SEQ ID NO. 1010 | SEQ ID NO. 1011 | SEQ ID NO. 1012 |
| 1.254 | SEQ ID NO. 1013 | SEQ ID NO. 1014 | SEQ ID NO. 1015 | SEQ ID NO. 1016 |
| 1.255 | SEQ ID NO. 1017 | SEQ ID NO. 1018 | SEQ ID NO. 1019 | SEQ ID NO. 1020 |
| 1.256 | SEQ ID NO. 1021 | SEQ ID NO. 1022 | SEQ ID NO. 1023 | SEQ ID NO. 1024 |
| 1.257 | SEQ ID NO. 1025 | SEQ ID NO. 1026 | SEQ ID NO. 1027 | SEQ ID NO. 1028 |
| 1.258 | SEQ ID NO. 1029 | SEQ ID NO. 1030 | SEQ ID NO. 1031 | SEQ ID NO. 1032 |
| 1.259 | SEQ ID NO. 1033 | SEQ ID NO. 1034 | SEQ ID NO. 1035 | SEQ ID NO. 1036 |
| 1.260 | SEQ ID NO. 1037 | SEQ ID NO. 1038 | SEQ ID NO. 1039 | SEQ ID NO. 1040 |
| 1.261 | SEQ ID NO. 1041 | SEQ ID NO. 1042 | SEQ ID NO. 1043 | SEQ ID NO. 1044 |
| 1.262 | SEQ ID NO. 1045 | SEQ ID NO. 1046 | SEQ ID NO. 1047 | SEQ ID NO. 1048 |
| 1.263 | SEQ ID NO. 1049 | SEQ ID NO. 1050 | SEQ ID NO. 1051 | SEQ ID NO. 1052 |
| 1.264 | SEQ ID NO. 1053 | SEQ ID NO. 1054 | SEQ ID NO. 1055 | SEQ ID NO. 1056 |
| 1.265 | SEQ ID NO. 1057 | SEQ ID NO. 1058 | SEQ ID NO. 1059 | SEQ ID NO. 1060 |
| 1.266 | SEQ ID NO. 1061 | SEQ ID NO. 1062 | SEQ ID NO. 1063 | SEQ ID NO. 1064 |
| 1.267 | SEQ ID NO. 1065 | SEQ ID NO. 1066 | SEQ ID NO. 1067 | SEQ ID NO. 1068 |
| 1.268 | SEQ ID NO. 1069 | SEQ ID NO. 1070 | SEQ ID NO. 1071 | SEQ ID NO. 1072 |
| 1.269 | SEQ ID NO. 1073 | SEQ ID NO. 1074 | SEQ ID NO. 1075 | SEQ ID NO. 1076 |
| 1.270 | SEQ ID NO. 1077 | SEQ ID NO. 1078 | SEQ ID NO. 1079 | SEQ ID NO. 1080 |
| 1.271 | SEQ ID NO. 1081 | SEQ ID NO. 1082 | SEQ ID NO. 1083 | SEQ ID NO. 1084 |
| 1.272 | SEQ ID NO. 1085 | SEQ ID NO. 1086 | SEQ ID NO. 1087 | SEQ ID NO. 1088 |
| 1.273 | SEQ ID NO. 1089 | SEQ ID NO. 1090 | SEQ ID NO. 1091 | SEQ ID NO. 1092 |
| 1.274 | SEQ ID NO. 1093 | SEQ ID NO. 1094 | SEQ ID NO. 1095 | SEQ ID NO. 1096 |
| 1.275 | SEQ ID NO. 1097 | SEQ ID NO. 1098 | SEQ ID NO. 1099 | SEQ ID NO. 1100 |
| 1.276 | SEQ ID NO. 1101 | SEQ ID NO. 1102 | SEQ ID NO. 1103 | SEQ ID NO. 1104 |
| 1.277 | SEQ ID NO. 1105 | SEQ ID NO. 1106 | SEQ ID NO. 1107 | SEQ ID NO. 1108 |
| 1.278 | SEQ ID NO. 1109 | SEQ ID NO. 1110 | SEQ ID NO. 1111 | SEQ ID NO. 1112 |
| 1.279 | SEQ ID NO. 1113 | SEQ ID NO. 1114 | SEQ ID NO. 1115 | SEQ ID NO. 1116 |
| 1.280 | SEQ ID NO. 1117 | SEQ ID NO. 1118 | SEQ ID NO. 1119 | SEQ ID NO. 1120 |
| 1.281 | SEQ ID NO. 1121 | SEQ ID NO. 1122 | SEQ ID NO. 1123 | SEQ ID NO. 1124 |
| 1.282 | SEQ ID NO. 1125 | SEQ ID NO. 1126 | SEQ ID NO. 1127 | SEQ ID NO. 1128 |
| 1.283 | SEQ ID NO. 1129 | SEQ ID NO. 1130 | SEQ ID NO. 1131 | SEQ ID NO. 1132 |
| 1.284 | SEQ ID NO. 1133 | SEQ ID NO. 1134 | SEQ ID NO. 1135 | SEQ ID NO. 1136 |
| 1.285 | SEQ ID NO. 1137 | SEQ ID NO. 1138 | SEQ ID NO. 1139 | SEQ ID NO. 1140 |
| 1.286 | SEQ ID NO. 1141 | SEQ ID NO. 1142 | SEQ ID NO. 1143 | SEQ ID NO. 1144 |
| 1.287 | SEQ ID NO. 1145 | SEQ ID NO. 1146 | SEQ ID NO. 1147 | SEQ ID NO. 1148 |
| 1.288 | SEQ ID NO. 1149 | SEQ ID NO. 1150 | SEQ ID NO. 1151 | SEQ ID NO. 1152 |
| 1.289 | SEQ ID NO. 1153 | SEQ ID NO. 1154 | SEQ ID NO. 1155 | SEQ ID NO. 1156 |
| 1.290 | SEQ ID NO. 1157 | SEQ ID NO. 1158 | SEQ ID NO. 1159 | SEQ ID NO. 1160 |
| 1.291 | SEQ ID NO. 1161 | SEQ ID NO. 1162 | SEQ ID NO. 1163 | SEQ ID NO. 1164 |
| 1.292 | SEQ ID NO. 1165 | SEQ ID NO. 1166 | SEQ ID NO. 1167 | SEQ ID NO. 1168 |
| 1.293 | SEQ ID NO. 1169 | SEQ ID NO. 1170 | SEQ ID NO. 1171 | SEQ ID NO. 1172 |
| 1.294 | SEQ ID NO. 1173 | SEQ ID NO. 1174 | SEQ ID NO. 1175 | SEQ ID NO. 1176 |
| 1.295 | SEQ ID NO. 1177 | SEQ ID NO. 1178 | SEQ ID NO. 1179 | SEQ ID NO. 1180 |
| 1.296 | SEQ ID NO. 1181 | SEQ ID NO. 1182 | SEQ ID NO. 1183 | SEQ ID NO. 1184 |
| 1.297 | SEQ ID NO. 1185 | SEQ ID NO. 1186 | SEQ ID NO. 1187 | SEQ ID NO. 1188 |
| 1.298 | SEQ ID NO. 1189 | SEQ ID NO. 1190 | SEQ ID NO. 1191 | SEQ ID NO. 1192 |
| 1.299 | SEQ ID NO. 1193 | SEQ ID NO. 1194 | SEQ ID NO. 1195 | SEQ ID NO. 1196 |
| 1.300 | SEQ ID NO. 1197 | SEQ ID NO. 1198 | SEQ ID NO. 1199 | SEQ ID NO. 1200 |
| 1.301 | SEQ ID NO. 1201 | SEQ ID NO. 1202 | SEQ ID NO. 1203 | SEQ ID NO. 1204 |
| 1.302 | SEQ ID NO. 1205 | SEQ ID NO. 1206 | SEQ ID NO. 1207 | SEQ ID NO. 1208 |
| 1.303 | SEQ ID NO. 1209 | SEQ ID NO. 1210 | SEQ ID NO. 1211 | SEQ ID NO. 1212 |
| 1.304 | SEQ ID NO. 1213 | SEQ ID NO. 1214 | SEQ ID NO. 1215 | SEQ ID NO. 1216 |
| 1.305 | SEQ ID NO. 1217 | SEQ ID NO. 1218 | SEQ ID NO. 1219 | SEQ ID NO. 1220 |
| 1.306 | SEQ ID NO. 1221 | SEQ ID NO. 1222 | SEQ ID NO. 1223 | SEQ ID NO. 1224 |
| 1.307 | SEQ ID NO. 1225 | SEQ ID NO. 1226 | SEQ ID NO. 1227 | SEQ ID NO. 1228 |
| 1.308 | SEQ ID NO. 1229 | SEQ ID NO. 1230 | SEQ ID NO. 1231 | SEQ ID NO. 1232 |
| 1.309 | SEQ ID NO. 1233 | SEQ ID NO. 1234 | SEQ ID NO. 1235 | SEQ ID NO. 1236 |
| 1.310 | SEQ ID NO. 1237 | SEQ ID NO. 1238 | SEQ ID NO. 1239 | SEQ ID NO. 1240 |
| 1.311 | SEQ ID NO. 1241 | SEQ ID NO. 1242 | SEQ ID NO. 1243 | SEQ ID NO. 1244 |
| 1.312 | SEQ ID NO. 1245 | SEQ ID NO. 1246 | SEQ ID NO. 1247 | SEQ ID NO. 1248 |
| 1.313 | SEQ ID NO. 1249 | SEQ ID NO. 1250 | SEQ ID NO. 1251 | SEQ ID NO. 1252 |
| 1.314 | SEQ ID NO. 1253 | SEQ ID NO. 1254 | SEQ ID NO. 1255 | SEQ ID NO. 1256 |
| 1.315 | SEQ ID NO. 1257 | SEQ ID NO. 1258 | SEQ ID NO. 1259 | SEQ ID NO. 1260 |
| 1.316 | SEQ ID NO. 1261 | SEQ ID NO. 1262 | SEQ ID NO. 1263 | SEQ ID NO. 1264 |

[0095] In one aspect of the invention, the family 1 or family 1-like binding molecule comprises a human V_{H} domain comprising a CDR3 sequence comprising SEQ ID NO. 3 or a sequence with at least 70%, at least 80%, at least 90%, or at least 95% homology to SEQ ID NO. 3.

[0096] In one embodiment, the family 1 or family 1-like binding molecule comprises at least one immunoglobulin single domain antibody directed against IL-17RA wherein said domain is a human V_{H} domain and wherein said V_{H} domain comprises at least one antigen binding site comprising a CDR3 sequence having SEQ ID NO. 3 or a sequence with at least 70%, at least 80%, at least 90%, or at least 95% homology to SEQ ID NO. 3.

[0097] In one embodiment, homology is at least 90% homology to SEQ ID NO. 3.

[0098] In one embodiment, the CDR3 sequence is selected from one of the CDR3 sequences as shown in table 1 with reference to FIG. 1. Thus, the CDR3 sequence is selected from SEQ ID Nos. 3, 7, 11, 15, 19, 23, 27, 31, 35, 39, 43, 47, 51, 55, 59, 63, 67, 71, 75, 79, 83, 87, 91, 95, 99, 103, 107, 111, 115, 119, 127, 131, 135, 139, 143, 147, 151, 155, 159, 163, 167, 171, 175, 179, 183, 187, 191, 195, 199, 203, 207, 211, 215, 219, 223, 227, 231, 235, 239, 243, 247, 251, 255, 259, 263, 267, 271, 275, 279, 283, 287, 291, 295, 299, 30, 307, 311, 315, 319, 323, 327, 331, 335, 339, 343, 347, 351, 355, 363, 367, 371, 375, 379, 383, 387, 391, 395, 399, 403, 407, 411, 415, 419, 423, 427, 431, 435, 439, 443, 447, 451, 455, 459, 463, 467, 471, 475, 479, 483, 487, 491, 495, 499, 503. 507, 511, 515, 519, 523, 527, 531, 535, 539, 543, 547, 551, 555, 563, 567, 571, 575, 579, 583, 587, 591, 595, 599, 603, 607, 611, 615, 619, 623, 627, 631, 635, 639, 643, 647, 651, 655, 659, 663, 667, 675, 679, 683, 687, 691, 695, 699, 703, 707, 711, 715, 723, 727, 731, 735, 739, 743, 747, 751, 755, 759, 763, 767, 771, 775, 779, 783, 787, 791, 795, 799, 803, 807, 811, 815, 819, 823, 827, 831, 835, 839, 843, 847, 851, 855, 859, 871, 875, 879, 883, 887, 891, 895, 899, 903, 907, 911, 915, 919, 923, 927, 931, 935, 939, 943, 947, 951, 955, 959, 963, 967, 971, 975, 979, 983, 987, 991, 995, 999, 1003, 1007, 1011, 1015, 1019, 1023, 1027, 1031, 1035, 1039, 1043, 1047, 1051, 1055, 1059, 1063, 1067, 1071, 1075, 1079, 1083, 1087, 1091, 1095, 1099, 1103, 1107, 1111, 1115, 1119, 1123, 1127, 1131, 1135, 1139, 1143, 1147, 1151, 1155, 1159, 1163, 1167, 1171, 1175, 1179, 1183, 1187, 1191, 1195, 1199, 1203, 1207, 1211, 1215, 1219, 1223, 1227, 1231, 1235, 1239, 1243, 1247, 1251, 1259 or 1263.

[0099] In one embodiment, the family 1 or family 1-like binding molecule comprises at least one antigen binding site comprising CDR1, CDR2 and CDR3, said CDR1 region comprising or consisting of amino acid sequence SEQ ID NO. 1 or a sequence with at least 70%, at least 80%, at least 90%, or at least 95% homology thereto, said CDR2 region comprising or consisting of the amino acid sequence SEQ ID NO. 2 or a sequence with at least 70%, at least 80%, at least 90%, or at least 95% homology thereto, and said CDR3 region comprising or consisting of the amino acid sequence SEQ ID NO. 3 or a sequence with at least 60%, at least 70%, at least 80%, at least 90%, or at least 95% homology thereto. For example, the CDR sequence may be a CDR sequence selected from those shown in FIG. 1.

[0100] In one embodiment, said CDR1 comprises or consists of the amino acid sequence as shown in SEQ ID NO. 1 or a sequence with at least 70%, 80%, 81%, 82%, 83%, 84%, 85%, 86%, 87%, 88%, 89%, 90%, 91%, 92%, 93%, 94%, 95% 96%, 97%, 98% or 99% homology thereto. In one embodiment, said CDR2 comprises or consists of the amino acid sequence as shown in SEQ ID NO: 2 or a sequence with at least 70%, 80%, 81%, 82%, 83%, 84%, 85%, 86%, 87%, 88%, 89%, 90%, 91%, 92%, 93%, 94%, 95% 96%, 97%, 98% or 99% homology thereto. In one embodiment, said CDR3 comprises or consists of the amino acid sequence as shown in SEQ ID NO. 3 or a sequence with at least 60%, 65%, 70%, 71%, 72%, 73%, 74%, 75%, 76%, 77%, 78%, 79%, 80%, 81%, 82%, 83%, 84%, 85%, 86%, 87%, 88%, 89%, 90%, 91%, 92%, 93%, 94%, 95% 96%, 97%, 98% or 99% homology thereto.

[0101] In one embodiment, CDR1 comprises or consists of one of the CDR1 amino acid sequence listed above in table 1 with reference to FIG. 1, CDR2 comprises or consists of one of the CDR2 amino acid sequence listed above in table 1 with reference to FIG. 1 and CDR3 comprises or consists of one of the CDR3 amino acid sequence listed above in table 1 with reference to FIG. 1. In one embodiment, the binding molecule has combinations of CDR1, CDR2 and CDR3 as shown for clones 1.1 to 1.316 in FIG. 1. In one embodiment, the binding molecule has combinations of CDR1, CDR2 and CDR3 as shown for clones 1.1 to 1.6 in FIG. 1. In one embodiment, the binding molecule comprises a set of CDR1, CDR2 and CDR3 sequences of a V_{H} sequence as shown for clones 1.1 to 1.316 in FIG. 1. In one embodiment, the binding molecule has a set of CDR1, CDR2 and CDR3 sequences of a V_{H} sequence as shown for clones 1.1 to 1.6 in FIG. 1.

[0102] Thus, in one embodiment, CDR1 is SEQ ID NO. 1, CDR2 is SEQ ID NO. 2 and CDR3 is SEQ ID NO. 3. In another embodiment, CDR1 is SEQ ID NO. 5, CDR2 is SEQ ID NO. 6 and CDR3 is SEQ ID NO. 7. In another embodiment, CDR1 is SEQ ID NO. 9, CDR2 is SEQ ID NO. 10 and CDR3 is SEQ ID NO. 11. In another embodiment, CDR1 is SEQ ID NO. 13, CDR2 is SEQ ID NO. 14 and CDR3 is SEQ ID NO. 15. In another embodiment, CDR1 is SEQ ID NO. 17, CDR2 is SEQ ID NO. 18 and CDR3 is SEQ ID NO. 19. In another embodiment, CDR1 is SEQ ID NO. 21, CDR2 is SEQ ID NO. 22 and CDR3 is SEQ ID NO. 23.

[0103] In one embodiment, the family 1 or family 1-like sequence has a V_{H} domain that comprises or consists of SEQ ID NO. 4 or a sequence with at least 40%, 50%, 60%, 70%, 80%, 81%, 82%, 83%, 84%, 85%, 86%, 87%, 88%, 89%, 90%, 91%, 92%, 93%, 94%, 95% 96%, 97%, 98% or 99% homology thereto. CDR sequences of such sequences are shown in FIG. 1. For example, the V_{H} domain comprises or consists of one of the V_{H} amino acid sequences listed above for clones 1.1 to 1.316 in table 1 with reference to FIG. 1. Thus, the V_{H} sequence comprises or consists of a sequence selected from SEQ ID NOs. 4, 8, 12, 16, 20, 24, 28, 32, 36, 40, 44, 48, 52, 56, 60, 64, 68, 72, 76, 80, 84, 88, 92, 96, 100, 104, 108, 112, 116, 120, 124, 128, 132, 136, 140, 144, 148, 152, 156, 160, 164, 168, 172, 176, 180, 184, 188, 192, 196, 200, 204, 208, 212, 216, 220, 224, 228, 232, 236, 240, 244, 248, 252, 256, 260, 264, 268, 272, 276, 280, 284, 288, 292, 296, 300, 304, 308, 312, 316, 320, 324, 328, 332, 336, 340, 344, 348, 352, 356, 360, 364, 368, 372, 376, 380, 384, 388, 392, 396, 400, 404, 408, 412, 416, 420, 424, 428, 432, 436, 440, 444, 448, 452, 456, 460, 464, 468, 472, 476, 480, 484, 488, 492, 496, 500, 504, 508, 512, 516, 520, 524, 528, 532, 536, 540, 544, 548, 552, 556, 560, 564, 568, 572, 576, 580, 584, 588, 592, 596, 600, 604, 608, 612, 616, 620, 624, 628, 632, 636, 640, 644, 648, 652, 656, 660, 664, 668, 672, 676, 680, 684, 688, 692, 696, 700, 704, 708, 712, 716, 720, 724, 728, 732, 736, 740, 744, 748, 752, 756, 760, 764, 768, 772, 776, 780, 784. 788, 792, 796, 800, 804, 808, 812, 816, 820, 824, 828, 832, 836, 840, 844, 848, 852, 856, 860, 864, 868, 872, 876, 880, 884, 888, 892 896, 900, 904, 908, 912, 916, 920, 924, 928, 932, 936, 940, 944, 948, 952, 956, 960, 964, 968, 972, 976, 980, 984, 988, 992, 996, 1000, 1004, 1008, 1012, 1016, 1020, 1024, 1028, 1032, 1036, 1040, 1044, 1048, 1052, 1056, 1060, 1064, 1068, 1072, 1076, 1080, 1084, 1088, 1092, 1096, 1100, 1104, 1108, 1112, 1116 1120, 1124, 1128, 1132, 1136, 1140, 1144, 1148, 1152, 1156, 1160, 1164, 1168, 1172, 1176, 1180, 1184, 1188, 1192, 1196, 1200, 1204, 1208, 1212, 1216, 1220, 1224, 1228, 1232, 1236, 1240, 1244, 1248, 1252, 1256, 1260 or 1264. In another embodiment, the V_{H} sequence is selected from one of the sequences in the forgoing but comprises 1, 2, 3, 4, 5, 6, 7, 8, 9 or 10 amino acid substitutions. In one embodiment, these are in the framework region. In another embodiment, these are in the CDRs. In one embodiment, the amino acid substitutions are in the framework and CDR sequences. In one embodiment, the V_{H} domain comprises or consists of SEQ ID NO. 4 or a sequence which comprises one or more amino acid substitutions, for example 1, 2, 3, 4, 5, 6, 7, 8, 9 or 10 amino acid substitutions.

[0104] In one embodiment, said V_{H} domain comprises or consists of a sequence selected from SEQ ID NOs. 4, 8, 12, 16, 20 or 24 or a sequence with at least 40%, 50%, 60%, 70%, 80%, 81%, 82%, 83%, 84%, 85%, 86%, 87%, 88%, 89%, 90%, 91%, 92%, 93%, 94%, 95% 96%, 97%, 98% or 99% homology thereto.

[0105] In another aspect, the invention relates to a binding molecule comprising or consisting of a V_{H} domain as shown in SEQ ID NO. 4 or a variant thereof comprising amino acid substitutions compared to SEQ ID NO. 4 as follows residue 1 is E, residue 30 is A, residue 55 is A, residue 58 is K, I, residue 59 is G, residue 63 is T, residue 100 is S, residue 101 is S, residue 104 is Y and/or residue 106 is S.

[0106] The family 1 or family 1-like binding molecules preferably have KD, Koff, KA, Kd and IC₅₀ values as further described herein and as shown in the examples.

[0107] The term “KD” refers to the “equilibrium dissociation constant” and refers to the value obtained in a titration measurement at equilibrium, or by dividing the dissociation rate constant (Koff) by the association rate constant (Kon). “KA” refers to the affinity constant. The association rate constant, the dissociation rate constant and the equilibrium dissociation constant are used to represent the binding affinity of an antibody to an antigen. Methods for determining association and dissociation rate constants are well known in the art. Using fluorescence-based techniques offers high sensitivity and the ability to examine samples in physiological buffers at equilibrium. Other experimental approaches and instruments such as a BIAcore® (biomolecular interaction analysis) assay can be used.

[0108] In another aspect, the invention relates to a binding molecule capable of binding human IL-17RA comprising a human V_{H} domain wherein said V_{H} domain comprises a family 2 or family 2-like sequence.

[0109] In one embodiment, the binding molecule comprises or consists of at least one immunoglobulin single domain antibody directed against IL-17RA, preferably human IL-17RA, wherein said domain is a human V_{H} domain and wherein said IL-17RA binding molecule comprises a family 2 or family 2-like sequence. These include the parent sequence and sequences of clones that are derived from the parent clone (clone 2.2) or a part thereof, for example a CDR3 sequence, and V_{H} sequences of clones or parts thereof that are derived from the parent clone 2.1 through a process of optimization, for example as shown in FIG. 2. CDR sequences and full length sequences of clones in family 2 are numbered according to table 2 as shown below.

TABLE 2
This shows SEQ ID NOs of family 2 CDR sequences and of family
2 full-length V_{H} sequences that are within the scope of the
invention. Corresponding sequences are shown in FIG. 2.

| Clone | | | | VH Full length |
|---|---|---|---|---|
| name | CDR1 Seq ID No | CDR2 Seq ID No | CDR3 Seq ID No | sequence Seq ID No |
| 2.1 | SEQ ID NO. 1265 | SEQ ID NO. 1266 | SEQ ID NO. 1267 | SEQ ID NO. 1268 |
| 2.2 | SEQ ID NO. 1269 | SEQ ID NO. 1270 | SEQ ID NO. 1271 | SEQ ID NO. 1272 |
| 2.3 | SEQ ID NO. 1273 | SEQ ID NO. 1274 | SEQ ID NO. 1275 | SEQ ID NO. 1276 |
| 2.4 | SEQ ID NO. 1277 | SEQ ID NO. 1278 | SEQ ID NO. 1279 | SEQ ID NO. 1280 |
| 2.5 | SEQ ID NO. 1281 | SEQ ID NO. 1282 | SEQ ID NO. 1283 | SEQ ID NO. 1284 |
| 2.6 | SEQ ID NO. 1285 | SEQ ID NO. 1286 | SEQ ID NO. 1287 | SEQ ID NO. 1288 |
| 2.7 | SEQ ID NO. 1289 | SEQ ID NO. 1290 | SEQ ID NO. 1291 | SEQ ID NO. 1292 |
| 2.8 | SEQ ID NO. 1293 | SEQ ID NO. 1294 | SEQ ID NO. 1295 | SEQ ID NO. 1296 |
| 2.9 | SEQ ID NO. 1297 | SEQ ID NO. 1298 | SEQ ID NO. 1299 | SEQ ID NO. 1300 |
| 2.10 | SEQ ID NO. 1301 | SEQ ID NO. 1302 | SEQ ID NO. 1303 | SEQ ID NO. 1304 |
| 2.11 | SEQ ID NO. 1305 | SEQ ID NO. 1306 | SEQ ID NO. 1307 | SEQ ID NO. 1308 |
| 2.12 | SEQ ID NO. 1309 | SEQ ID NO. 1310 | SEQ ID NO. 1311 | SEQ ID NO. 1312 |
| 2.13 | SEQ ID NO. 1313 | SEQ ID NO. 1314 | SEQ ID NO. 1315 | SEQ ID NO. 1316 |
| 2.14 | SEQ ID NO. 1317 | SEQ ID NO. 1318 | SEQ ID NO. 1319 | SEQ ID NO. 1320 |
| 2.15 | SEQ ID NO. 1321 | SEQ ID NO. 1322 | SEQ ID NO. 1323 | SEQ ID NO. 1324 |
| 2.16 | SEQ ID NO. 1325 | SEQ ID NO. 1326 | SEQ ID NO. 1327 | SEQ ID NO. 1328 |
| 2.17 | SEQ ID NO. 1329 | SEQ ID NO. 1330 | SEQ ID NO. 1331 | SEQ ID NO. 1332 |
| 2.18 | SEQ ID NO. 1333 | SEQ ID NO. 1334 | SEQ ID NO. 1335 | SEQ ID NO. 1336 |
| 2.19 | SEQ ID NO. 1337 | SEQ ID NO. 1338 | SEQ ID NO. 1339 | SEQ ID NO. 1340 |
| 2.20 | SEQ ID NO. 1341 | SEQ ID NO. 1342 | SEQ ID NO. 1343 | SEQ ID NO. 1344 |
| 2.21 | SEQ ID NO. 1345 | SEQ ID NO. 1346 | SEQ ID NO. 1347 | SEQ ID NO. 1348 |
| 2.22 | SEQ ID NO. 1349 | SEQ ID NO. 1350 | SEQ ID NO. 1351 | SEQ ID NO. 1352 |
| 2.23 | SEQ ID NO. 1353 | SEQ ID NO. 1354 | SEQ ID NO. 1355 | SEQ ID NO. 1356 |
| 2.24 | SEQ ID NO. 1357 | SEQ ID NO. 1358 | SEQ ID NO. 1359 | SEQ ID NO. 1360 |
| 2.25 | SEQ ID NO. 1361 | SEQ ID NO. 1362 | SEQ ID NO. 1363 | SEQ ID NO. 1364 |
| 2.26 | SEQ ID NO. 1365 | SEQ ID NO. 1366 | SEQ ID NO. 1367 | SEQ ID NO. 1368 |
| 2.27 | SEQ ID NO. 1369 | SEQ ID NO. 1370 | SEQ ID NO. 1371 | SEQ ID NO. 1372 |
| 2.28 | SEQ ID NO. 1373 | SEQ ID NO. 1374 | SEQ ID NO. 1375 | SEQ ID NO. 1376 |
| 2.29 | SEQ ID NO. 1377 | SEQ ID NO. 1378 | SEQ ID NO. 1379 | SEQ ID NO. 1380 |
| 2.30 | SEQ ID NO. 1381 | SEQ ID NO. 1382 | SEQ ID NO. 1383 | SEQ ID NO. 1384 |
| 2.31 | SEQ ID NO. 1385 | SEQ ID NO. 1386 | SEQ ID NO. 1387 | SEQ ID NO. 1388 |
| 2.32 | SEQ ID NO. 1389 | SEQ ID NO. 1390 | SEQ ID NO. 1391 | SEQ ID NO. 1392 |
| 2.33 | SEQ ID NO. 1393 | SEQ ID NO. 1394 | SEQ ID NO. 1395 | SEQ ID NO. 1396 |
| 2.34 | SEQ ID NO. 1397 | SEQ ID NO. 1398 | SEQ ID NO. 1399 | SEQ ID NO. 1400 |
| 2.35 | SEQ ID NO. 1401 | SEQ ID NO. 1402 | SEQ ID NO. 1403 | SEQ ID NO. 1404 |
| 2.36 | SEQ ID NO. 1405 | SEQ ID NO. 1406 | SEQ ID NO. 1407 | SEQ ID NO. 1408 |
| 2.37 | SEQ ID NO. 1409 | SEQ ID NO. 1410 | SEQ ID NO. 1411 | SEQ ID NO. 1412 |
| 2.38 | SEQ ID NO. 1413 | SEQ ID NO. 1414 | SEQ ID NO. 1415 | SEQ ID NO. 1416 |
| 2.39 | SEQ ID NO. 1417 | SEQ ID NO. 1418 | SEQ ID NO. 1419 | SEQ ID NO. 1420 |
| 2.40 | SEQ ID NO. 1421 | SEQ ID NO. 1422 | SEQ ID NO. 1423 | SEQ ID NO. 1424 |
| 2.41 | SEQ ID NO. 1425 | SEQ ID NO. 1426 | SEQ ID NO. 1427 | SEQ ID NO. 1428 |
| 2.42 | SEQ ID NO. 1429 | SEQ ID NO. 1430 | SEQ ID NO. 1431 | SEQ ID NO. 1432 |
| 2.43 | SEQ ID NO. 1433 | SEQ ID NO. 1434 | SEQ ID NO. 1435 | SEQ ID NO. 1436 |
| 2.44 | SEQ ID NO. 1437 | SEQ ID NO. 1438 | SEQ ID NO. 1439 | SEQ ID NO. 1440 |
| 2.45 | SEQ ID NO. 1441 | SEQ ID NO. 1442 | SEQ ID NO. 1443 | SEQ ID NO. 1444 |
| 2.46 | SEQ ID NO. 1445 | SEQ ID NO. 1446 | SEQ ID NO. 1447 | SEQ ID NO. 1448 |
| 2.47 | SEQ ID NO. 1449 | SEQ ID NO. 1450 | SEQ ID NO. 1451 | SEQ ID NO. 1452 |
| 2.48 | SEQ ID NO. 1453 | SEQ ID NO. 1454 | SEQ ID NO. 1455 | SEQ ID NO. 1456 |
| 2.49 | SEQ ID NO. 1457 | SEQ ID NO. 1458 | SEQ ID NO. 1459 | SEQ ID NO. 1460 |
| 2.50 | SEQ ID NO. 1461 | SEQ ID NO. 1462 | SEQ ID NO. 1463 | SEQ ID NO. 1464 |
| 2.51 | SEQ ID NO. 1465 | SEQ ID NO. 1466 | SEQ ID NO. 1467 | SEQ ID NO. 1468 |
| 2.52 | SEQ ID NO. 1469 | SEQ ID NO. 1470 | SEQ ID NO. 1471 | SEQ ID NO. 1472 |
| 2.53 | SEQ ID NO. 1473 | SEQ ID NO. 1474 | SEQ ID NO. 1475 | SEQ ID NO. 1476 |
| 2.54 | SEQ ID NO. 1477 | SEQ ID NO. 1478 | SEQ ID NO. 1479 | SEQ ID NO. 1480 |
| 2.55 | SEQ ID NO. 1481 | SEQ ID NO. 1482 | SEQ ID NO. 1483 | SEQ ID NO. 1484 |
| 2.56 | SEQ ID NO. 1485 | SEQ ID NO. 1486 | SEQ ID NO. 1487 | SEQ ID NO. 1488 |
| 2.57 | SEQ ID NO. 1489 | SEQ ID NO. 1490 | SEQ ID NO. 1491 | SEQ ID NO. 1492 |
| 2.58 | SEQ ID NO. 1493 | SEQ ID NO. 1494 | SEQ ID NO. 1495 | SEQ ID NO. 1496 |
| 2.59 | SEQ ID NO. 1497 | SEQ ID NO. 1498 | SEQ ID NO. 1499 | SEQ ID NO. 1500 |
| 2.60 | SEQ ID NO. 1501 | SEQ ID NO. 1502 | SEQ ID NO. 1503 | SEQ ID NO. 1504 |
| 2.61 | SEQ ID NO. 1505 | SEQ ID NO. 1506 | SEQ ID NO. 1507 | SEQ ID NO. 1508 |
| 2.62 | SEQ ID NO. 1509 | SEQ ID NO. 1510 | SEQ ID NO. 1511 | SEQ ID NO. 1512 |
| 2.63 | SEQ ID NO. 1513 | SEQ ID NO. 1514 | SEQ ID NO. 1515 | SEQ ID NO. 1516 |
| 2.64 | SEQ ID NO. 1517 | SEQ ID NO. 1518 | SEQ ID NO. 1519 | SEQ ID NO. 1520 |
| 2.65 | SEQ ID NO. 1521 | SEQ ID NO. 1522 | SEQ ID NO. 1523 | SEQ ID NO. 1524 |
| 2.66 | SEQ ID NO. 1525 | SEQ ID NO. 1526 | SEQ ID NO. 1527 | SEQ ID NO. 1528 |
| 2.67 | SEQ ID NO. 1529 | SEQ ID NO. 1530 | SEQ ID NO. 1531 | SEQ ID NO. 1532 |
| 2.68 | SEQ ID NO. 1533 | SEQ ID NO. 1534 | SEQ ID NO. 1535 | SEQ ID NO. 1536 |
| 2.69 | SEQ ID NO. 1537 | SEQ ID NO. 1538 | SEQ ID NO. 1539 | SEQ ID NO. 1540 |
| 2.70 | SEQ ID NO. 1541 | SEQ ID NO. 1542 | SEQ ID NO. 1543 | SEQ ID NO. 1544 |
| 2.71 | SEQ ID NO. 1545 | SEQ ID NO. 1546 | SEQ ID NO. 1547 | SEQ ID NO. 1548 |
| 2.72 | SEQ ID NO. 1549 | SEQ ID NO. 1550 | SEQ ID NO. 1551 | SEQ ID NO. 1552 |
| 2.73 | SEQ ID NO. 1553 | SEQ ID NO. 1554 | SEQ ID NO. 1555 | SEQ ID NO. 1556 |
| 2.74 | SEQ ID NO. 1557 | SEQ ID NO. 1558 | SEQ ID NO. 1559 | SEQ ID NO. 1560 |
| 2.75 | SEQ ID NO. 1561 | SEQ ID NO. 1562 | SEQ ID NO. 1563 | SEQ ID NO. 1564 |
| 2.76 | SEQ ID NO. 1565 | SEQ ID NO. 1566 | SEQ ID NO. 1567 | SEQ ID NO. 1568 |
| 2.77 | SEQ ID NO. 1569 | SEQ ID NO. 1570 | SEQ ID NO. 1571 | SEQ ID NO. 1572 |
| 2.78 | SEQ ID NO. 1573 | SEQ ID NO. 1574 | SEQ ID NO. 1575 | SEQ ID NO. 1576 |
| 2.79 | SEQ ID NO. 1577 | SEQ ID NO. 1578 | SEQ ID NO. 1579 | SEQ ID NO. 1580 |
| 2.80 | SEQ ID NO. 1581 | SEQ ID NO. 1582 | SEQ ID NO. 1583 | SEQ ID NO. 1584 |
| 2.81 | SEQ ID NO. 1585 | SEQ ID NO. 1586 | SEQ ID NO. 1587 | SEQ ID NO. 1588 |
| 2.82 | SEQ ID NO. 1589 | SEQ ID NO. 1590 | SEQ ID NO. 1591 | SEQ ID NO. 1592 |
| 2.83 | SEQ ID NO. 1593 | SEQ ID NO. 1594 | SEQ ID NO. 1595 | SEQ ID NO. 1596 |
| 2.84 | SEQ ID NO. 1597 | SEQ ID NO. 1598 | SEQ ID NO. 1599 | SEQ ID NO. 1600 |
| 2.85 | SEQ ID NO. 1601 | SEQ ID NO. 1602 | SEQ ID NO. 1603 | SEQ ID NO. 1604 |
| 2.86 | SEQ ID NO. 1605 | SEQ ID NO. 1606 | SEQ ID NO. 1607 | SEQ ID NO. 1608 |
| 2.87 | SEQ ID NO. 1609 | SEQ ID NO. 1610 | SEQ ID NO. 1611 | SEQ ID NO. 1612 |
| 2.88 | SEQ ID NO. 1613 | SEQ ID NO. 1614 | SEQ ID NO. 1615 | SEQ ID NO. 1616 |
| 2.89 | SEQ ID NO. 1617 | SEQ ID NO. 1618 | SEQ ID NO. 1619 | SEQ ID NO. 1620 |
| 2.90 | SEQ ID NO. 1621 | SEQ ID NO. 1622 | SEQ ID NO. 1623 | SEQ ID NO. 1624 |
| 2.91 | SEQ ID NO. 1625 | SEQ ID NO. 1626 | SEQ ID NO. 1627 | SEQ ID NO. 1628 |
| 2.92 | SEQ ID NO. 1629 | SEQ ID NO. 1630 | SEQ ID NO. 1631 | SEQ ID NO. 1632 |
| 2.93 | SEQ ID NO. 1633 | SEQ ID NO. 1634 | SEQ ID NO. 1635 | SEQ ID NO. 1636 |
| 2.94 | SEQ ID NO. 1637 | SEQ ID NO. 1638 | SEQ ID NO. 1639 | SEQ ID NO. 1640 |
| 2.95 | SEQ ID NO. 1641 | SEQ ID NO. 1642 | SEQ ID NO. 1643 | SEQ ID NO. 1644 |
| 2.96 | SEQ ID NO. 1645 | SEQ ID NO. 1646 | SEQ ID NO. 1647 | SEQ ID NO. 1648 |
| 2.97 | SEQ ID NO. 1649 | SEQ ID NO. 1650 | SEQ ID NO. 1651 | SEQ ID NO. 1652 |
| 2.98 | SEQ ID NO. 1653 | SEQ ID NO. 1654 | SEQ ID NO. 1655 | SEQ ID NO. 1656 |
| 2.99 | SEQ ID NO. 1657 | SEQ ID NO. 1658 | SEQ ID NO. 1659 | SEQ ID NO. 1660 |
| 2.100 | SEQ ID NO. 1661 | SEQ ID NO. 1662 | SEQ ID NO. 1663 | SEQ ID NO. 1664 |
| 2.101 | SEQ ID NO. 1665 | SEQ ID NO. 1666 | SEQ ID NO. 1667 | SEQ ID NO. 1668 |
| 2.102 | SEQ ID NO. 1669 | SEQ ID NO. 1670 | SEQ ID NO. 1671 | SEQ ID NO. 1672 |
| 2.103 | SEQ ID NO. 1673 | SEQ ID NO. 1674 | SEQ ID NO. 1675 | SEQ ID NO. 1676 |
| 2.104 | SEQ ID NO. 1677 | SEQ ID NO. 1678 | SEQ ID NO. 1679 | SEQ ID NO. 1680 |
| 2.105 | SEQ ID NO. 1681 | SEQ ID NO. 1682 | SEQ ID NO. 1683 | SEQ ID NO. 1684 |
| 2.106 | SEQ ID NO. 1685 | SEQ ID NO. 1686 | SEQ ID NO. 1687 | SEQ ID NO. 1688 |
| 2.107 | SEQ ID NO. 1689 | SEQ ID NO. 1690 | SEQ ID NO. 1691 | SEQ ID NO. 1692 |
| 2.108 | SEQ ID NO. 1693 | SEQ ID NO. 1694 | SEQ ID NO. 1695 | SEQ ID NO. 1696 |
| 2.109 | SEQ ID NO. 1697 | SEQ ID NO. 1698 | SEQ ID NO. 1699 | SEQ ID NO. 1700 |
| 2.110 | SEQ ID NO. 1701 | SEQ ID NO. 1702 | SEQ ID NO. 1703 | SEQ ID NO. 1704 |
| 2.111 | SEQ ID NO. 1705 | SEQ ID NO. 1706 | SEQ ID NO. 1707 | SEQ ID NO. 1708 |
| 2.112 | SEQ ID NO. 1709 | SEQ ID NO. 1710 | SEQ ID NO. 1711 | SEQ ID NO. 1712 |
| 2.113 | SEQ ID NO. 1713 | SEQ ID NO. 1714 | SEQ ID NO. 1715 | SEQ ID NO. 1716 |
| 2.114 | SEQ ID NO. 1717 | SEQ ID NO. 1718 | SEQ ID NO. 1719 | SEQ ID NO. 1720 |
| 2.115 | SEQ ID NO. 1721 | SEQ ID NO. 1722 | SEQ ID NO. 1723 | SEQ ID NO. 1724 |
| 2.116 | SEQ ID NO. 1725 | SEQ ID NO. 1726 | SEQ ID NO. 1727 | SEQ ID NO. 1728 |
| 2.117 | SEQ ID NO. 1729 | SEQ ID NO. 1730 | SEQ ID NO. 1731 | SEQ ID NO. 1732 |
| 2.118 | SEQ ID NO. 1733 | SEQ ID NO. 1734 | SEQ ID NO. 1735 | SEQ ID NO. 1736 |
| 2.119 | SEQ ID NO. 1737 | SEQ ID NO. 1738 | SEQ ID NO. 1739 | SEQ ID NO. 1740 |
| 2.120 | SEQ ID NO. 1741 | SEQ ID NO. 1742 | SEQ ID NO. 1743 | SEQ ID NO. 1744 |
| 2.121 | SEQ ID NO. 1745 | SEQ ID NO. 1746 | SEQ ID NO. 1747 | SEQ ID NO. 1748 |
| 2.122 | SEQ ID NO. 1749 | SEQ ID NO. 1750 | SEQ ID NO. 1751 | SEQ ID NO. 1752 |
| 2.123 | SEQ ID NO. 1753 | SEQ ID NO. 1754 | SEQ ID NO. 1755 | SEQ ID NO. 1756 |
| 2.124 | SEQ ID NO. 1757 | SEQ ID NO. 1758 | SEQ ID NO. 1759 | SEQ ID NO. 1760 |
| 2.125 | SEQ ID NO. 1761 | SEQ ID NO. 1762 | SEQ ID NO. 1763 | SEQ ID NO. 1764 |

[0110] In one aspect, the invention relates to a family 2 or family 2-like binding molecule comprises a human V_{H} domain comprising a CDR3 sequence comprising SEQ ID NO. 1237 or a sequence with at least 70%, at least 80%, at least 90%, or at least 95% homology to SEQ ID NO. 1237.

[0111] In one embodiment, the family 2 or family 2-like binding molecule comprises at least one immunoglobulin single domain antibody directed against IL-17RA wherein said domain is a human V_{H} domain and wherein said V_{H} comprises at least one antigen binding site comprising a CDR3 sequence having SEQ ID NO. 1267 or a sequence with at least 70%, at least 80%, at least 90%, or at least 95% homology thereto. In one embodiment, sequence homology is at least 90%.

[0112] In one embodiment, the CDR3 sequence is selected from one of the CDR3 sequences as shown in table 2 with reference to FIG. 2. Thus, the CDR3 region comprises or consists of a sequence selected from SEQ ID Nos. 1267, 1271, 1275, 1279, 1283, 1287, 1291, 1295, 1299, 1303, 1307, 1311, 1315, 1319, 1323, 1327, 1331, 1335, 1339, 1343, 1347, 1351, 1355, 1359, 1363, 1367, 1371, 13751379, 1383, 1387, 1391, 1395, 1399, 1403, 1407, 1411, 1415, 1419, 1423, 1427, 1431, 1435, 1439, 1443, 1447, 1451, 1455, 1459, 1463, 1467, 1471, 1475, 1479, 1483, 1487, 1491, 1495, 1499, 1503, 1507, 1511, 1515, 1519, 1523, 1527, 1531, 1535, 1539, 1543, 1547, 1551, 1555, 1559, 1563, 1567, 1571, 1575, 1579, 1583, 1587, 1591, 1595, 1599, 1603, 1607, 1611, 1615, 1619, 1623, 1627, 1631, 1635, 1639, 1643, 1647, 1651, 1655, 1659, 1663, 1667, 1671, 1675, 1679, 1683, 1687, 1691, 1695, 1699, 1703, 1707, 1711, 1715, 1719, 1723, 1727, 1731, 1735, 1739, 1743, 1747, 1751, 1755, 1759 or 1763.

[0113] In one embodiment, the family 2 or family 2-like sequence comprises at least one antigen binding site comprising hypervariable regions CDR1, CDR2 and CDR3, said CDR1 comprises or consists of the amino acid sequence SEQ ID NO. 1265 or a sequence with at least 70%, at least 80%, at least 90%, or at least 95% homology thereto, said CDR2 comprises or consists of the amino acid sequence SEQ ID NO. 1266 or a sequence with at least 70%, at least 80%, at least 90%, or at least 95% homology thereto, and said CDR3 comprises or consists of the amino acid sequence SEQ ID NO. 1267 or a sequence with at least 70%, at least 80%, at least 90%, or at least 95% homology thereto. For example, the CDR sequence may be a CDR sequence selected from those shown in FIG. 2.

[0114] In one embodiment, said CDR1 comprises or consists of the amino acid sequence SEQ ID NO. 1265 or a sequence with at least 70%, 80%, 81%, 82%, 83%, 84%, 85%, 86%, 87%, 88%, 89%, 90%, 91%, 92%, 93%, 94%, 95% 96%, 97%, 98% or 99% homology thereto. In one embodiment, said CDR2 comprises or consists of the amino acid sequence SEQ ID NO. 1266 or a sequence with at least 70%, 80%, 81%, 82%, 83%, 84%, 85%, 86%, 87%, 88%, 89%, 90%, 91%, 92%, 93%, 94%, 95% 96%, 97%, 98% or 99% homology thereto. In one embodiment, said CDR3 comprises or consists of the amino acid sequence SEQ ID NO. 1267 or a sequence with at least 70%, 80%, 81%, 82%, 83%, 84%, 85%, 86%, 87%, 88%, 89%, 90%, 91%, 92%, 93%, 94%, 95% 96%, 97%, 98% or 99% homology thereto.

[0115] In one embodiment, CDR1 comprises or consists of one of the CDR1 amino acid sequence listed above in table 2 with reference to FIG. 2, CDR2 comprises or consists of one of the CDR2 amino acid sequence listed above in table 2 with reference to FIG. 2 and CDR3 comprises or consists of one of the CDR3 amino acid sequence listed above in table 2 with reference to FIG. 2. In one embodiment, the binding molecule has combinations of CDR1, CDR2 and CDR3 as shown for clones 2.1 to 2.125 in FIG. 2. In one embodiment, the binding molecule has combinations of CDR1, CDR2 and CDR3 as shown for clones 2.1 to 2.3 in FIG. 2.

[0116] In one embodiment, the binding molecule comprises a set of CDR1, CDR2 and CDR3 sequences of a V_{H} sequence as shown for clones 2.1 to 2.125 in FIG. 2. In one embodiment, the binding molecule has a set of CDR1, CDR2 and CDR3 sequences of a V_{H} sequence as shown for clones 2.1 to 2.3 in FIG. 2.

[0117] Thus, in one embodiment, CDR1 is SEQ ID NO. 1269, CDR2 is SEQ ID NO. 1270 and CDR3 is SEQ ID NO. 1271. In another embodiment, CDR1 is SEQ ID NO. 1272, CDR2 is SEQ ID NO. 1273 and CDR3 is SEQ ID NO. 1274.

[0118] In one embodiment, the family 2 or family 2-like binding molecule has a V_{H} domain that comprises or consists of SEQ ID NO. 1268 or a sequence with at least 40%, 50%, 60%, 70%, 80%, 81%, 82%, 83%, 84%, 85%, 86%, 87%, 88%, 89%, 90%, 91%, 92%, 93%, 94%, 95% 96%, 97%, 98% or 99% homology thereto. CDR sequences of such sequences are shown in FIG. 2. For example, the V_{H} domain comprises or consists of one of the V_{H} amino acid sequences listed above for clones 2.1 to 2.125 in table 2 with reference to FIG. 2.

[0119] Thus, the V_{H} domain comprises or consists of a sequence selected from SEQ ID NOs. 1268, 1272, 1276, 1280, 1284, 1288, 1292, 1296, 1300, 1304, 1308, 1312, 1316, 1320 1324, 1328, 1332, 1336, 1340, 1344, 1348, 1352, 1356, 1360, 1364, 1368, 1372, 1376 1380, 1384, 1388, 1392, 1396, 1400, 1404, 1408, 1412, 1416, 1420, 1424, 1428, 1432, 1436, 1440, 1444, 1448, 1452, 1456, 1460, 1464, 1468, 1476, 1480, 1484, 1488, 1492, 1496, 1500, 1504, 1508, 1512, 1516, 1520, 1524, 1528, 1532, 1536, 1540, 1544, 1548, 1552, 1556, 1560, 1564, 1568, 1572, 1576, 1580, 1584, 1588, 1592, 1596, 1600, 1604, 1608, 1612, 1616, 1620, 1624, 1628, 1632, 1636, 1640, 1644, 1648, 1652, 1656, 1660, 1664, 1668, 1672, 1676, 1680, 1684, 1688, 1692, 1696, 1700, 1704, 1708, 1712, 1716 1720, 1724, 1728, 1732, 1736, 1740, 1744, 1748, 1752, 1756, 1760 or 1764.

[0120] In another embodiment, the V_{H} domain comprises a sequence selected from one of the sequences in the forgoing but comprises 1, 2, 3, 4, 5, 6, 7, 8, 9 or 10 amino acid substitutions. In one embodiment, these are in the framework region. In another embodiment, these are in the CDRs. In one embodiment, the amino acid substitutions are in the framework and CDR sequences. In one embodiment, the V_{H} domain comprises or consists of SEQ ID NO. 1268 or a sequence which comprises one or more amino acid substitutions, for example 1, 2, 3, 4, 5, 6, 7, 8, 9 or 10 amino acid substitutions. For example, V_{H} domain comprises or consists of a sequence selected from SEQ ID NO. 1268 or 1272.

[0121] In one embodiment, the family 2 or family 2-like binding molecule has a V_{H} domain that comprises or consists of SEQ ID NO. 1268 or 1272, or a sequence with at least 40%, 50%, 60%, 70%, 80%, 81%, 82%, 83%, 84%, 85%, 87%, 88%, 89%, 90%, 91%, 92%, 93%, 94%, 96%, 97%, 98%, 99% homology thereto.

[0122] In another aspect, the invention relates to a binding molecule comprising or consisting of a V_{H} domain as shown in SEQ ID NO. 1268 or a variant thereof comprising amino acid substitutions compared to SEQ ID NO. 1268 as follows residue 31 is T, residue 43 is R, 54 is G, E, K, A, D, residue 55 is S, residue 57 is D, Y, N and/or residue 100 is I.

[0123] The family 2 or family 2-like binding molecules have KD, Koff, KA, Kd and IC₅₀ values as further described herein and as shown in the examples.

[0124] In one aspect, the invention relates to an isolated binding molecule capable of binding human IL-17RA comprising a human heavy chain variable immunoglobulin domain (V_{H}) wherein said V_{H} domain comprises a family 3 or family 3-like sequence.

[0125] In one embodiment, the binding molecule comprises or consists of at least one immunoglobulin single domain antibody directed against IL-17RA, preferably human IL-17RA, wherein said domain is a human V_{H} domain and wherein said VH domain comprises a family 3 or family 3-like sequence. These include the V_{H} sequence of the parent clone (clone 3.1) or a part thereof, for example a CDR3 sequence, and V_{H} sequences of clones or that are derived from the parent clone 3.1 through a process of optimization, for example as shown in FIG. 3. CDR sequences and full length sequences of clones in family 3 are numbered according to table 3 as shown below.

TABLE 3
This shows SEQ ID NOs of family 3-like CDR sequences and of
family full length V_{H} sequences that are within the scope of
the invention. Corresponding sequences are shown in FIG. 3.

| | | | | FULL LENGTH |
|---|---|---|---|---|
| Clone | CDR1 Seq ID No | CDR2 Seq ID No | CDR3 Seq ID No | Seq ID No |
| 3.1 | Seq ID No 1765 | Seq ID No 1766 | Seq ID No 1767 | Seq ID No 1768 |
| 3.2 | Seq ID No 1769 | Seq ID No 1770 | Seq ID No 1771 | Seq ID No 1772 |
| 3.3 | Seq ID No 1773 | Seq ID No 1774 | Seq ID No 1775 | Seq ID No 1776 |
| 3.4 | Seq ID No 1777 | Seq ID No 1778 | Seq ID No 1779 | Seq ID No 1780 |
| 3.5 | Seq ID No 1781 | Seq ID No 1782 | Seq ID No 1783 | Seq ID No 1784 |
| 3.6 | Seq ID No 1785 | Seq ID No 1786 | Seq ID No 1787 | Seq ID No 1788 |
| 3.7 | Seq ID No 1789 | Seq ID No 1790 | Seq ID No 1791 | Seq ID No 1792 |
| 3.8 | Seq ID No 1793 | Seq ID No 1794 | Seq ID No 1795 | Seq ID No 1796 |
| 3.9 | Seq ID No 1797 | Seq ID No 1798 | Seq ID No 1799 | Seq ID No 1800 |
| 3.10 | Seq ID No 1801 | Seq ID No 1802 | Seq ID No 1803 | Seq ID No 1804 |
| 3.11 | Seq ID No 1805 | Seq ID No 1806 | Seq ID No 1807 | Seq ID No 1808 |
| 3.12 | Seq ID No 1809 | Seq ID No 1810 | Seq ID No 1811 | Seq ID No 1812 |
| 3.13 | Seq ID No 1813 | Seq ID No 1814 | Seq ID No 1815 | Seq ID No 1816 |
| 3.14 | Seq ID No 1817 | Seq ID No 1818 | Seq ID No 1819 | Seq ID No 1820 |
| 3.15 | Seq ID No 1821 | Seq ID No 1822 | Seq ID No 1823 | Seq ID No 1824 |
| 3.16 | Seq ID No 1825 | Seq ID No 1826 | Seq ID No 1827 | Seq ID No 1828 |
| 3.17 | Seq ID No 1829 | Seq ID No 1830 | Seq ID No 1831 | Seq ID No 1832 |
| 3.18 | Seq ID No 1833 | Seq ID No 1834 | Seq ID No 1835 | Seq ID No 1836 |
| 3.19 | Seq ID No 1837 | Seq ID No 1838 | Seq ID No 1839 | Seq ID No 1840 |
| 3.20 | Seq ID No 1841 | Seq ID No 1842 | Seq ID No 1843 | Seq ID No 1844 |
| 3.21 | Seq ID No 1845 | Seq ID No 1846 | Seq ID No 1847 | Seq ID No 1848 |
| 3.22 | Seq ID No 1849 | Seq ID No 1850 | Seq ID No 1851 | Seq ID No 1852 |
| 3.23 | Seq ID No 1853 | Seq ID No 1854 | Seq ID No 1855 | Seq ID No 1856 |
| 3.24 | Seq ID No 1857 | Seq ID No 1858 | Seq ID No 1859 | Seq ID No 1860 |
| 3.25 | Seq ID No 1861 | Seq ID No 1862 | Seq ID No 1863 | Seq ID No 1864 |
| 3.26 | Seq ID No 1865 | Seq ID No 1866 | Seq ID No 1867 | Seq ID No 1868 |
| 3.27 | Seq ID No 1869 | Seq ID No 1870 | Seq ID No 1871 | Seq ID No 1872 |
| 3.28 | Seq ID No 1873 | Seq ID No 1874 | Seq ID No 1875 | Seq ID No 1876 |
| 3.29 | Seq ID No 1877 | Seq ID No 1878 | Seq ID No 1879 | Seq ID No 1880 |
| 3.30 | Seq ID No 1881 | Seq ID No 1882 | Seq ID No 1883 | Seq ID No 1884 |
| 3.31 | Seq ID No 1885 | Seq ID No 1886 | Seq ID No 1887 | Seq ID No 1888 |
| 3.32 | Seq ID No 1889 | Seq ID No 1890 | Seq ID No 1891 | Seq ID No 1892 |
| 3.33 | Seq ID No 1893 | Seq ID No 1894 | Seq ID No 1895 | Seq ID No 1896 |
| 3.34 | Seq ID No 1897 | Seq ID No 1898 | Seq ID No 1899 | Seq ID No 1900 |
| 3.35 | Seq ID No 1901 | Seq ID No 1902 | Seq ID No 1903 | Seq ID No 1904 |
| 3.36 | Seq ID No 1905 | Seq ID No 1906 | Seq ID No 1907 | Seq ID No 1908 |
| 3.37 | Seq ID No 1909 | Seq ID No 1910 | Seq ID No 1911 | Seq ID No 1912 |
| 3.38 | Seq ID No 1913 | Seq ID No 1914 | Seq ID No 1915 | Seq ID No 1916 |
| 3.39 | Seq ID No 1917 | Seq ID No 1918 | Seq ID No 1919 | Seq ID No 1920 |
| 3.40 | Seq ID No 1921 | Seq ID No 1922 | Seq ID No 1923 | Seq ID No 1924 |
| 3.41 | Seq ID No 1925 | Seq ID No 1926 | Seq ID No 1927 | Seq ID No 1928 |
| 3.42 | Seq ID No 1929 | Seq ID No 1930 | Seq ID No 1931 | Seq ID No 1932 |
| 3.43 | Seq ID No 1933 | Seq ID No 1934 | Seq ID No 1935 | Seq ID No 1936 |
| 3.44 | Seq ID No 1937 | Seq ID No 1938 | Seq ID No 1939 | Seq ID No 1940 |
| 3.45 | Seq ID No 1941 | Seq ID No 1942 | Seq ID No 1943 | Seq ID No 1944 |
| 3.46 | Seq ID No 1945 | Seq ID No 1946 | Seq ID No 1947 | Seq ID No 1948 |
| 3.47 | Seq ID No 1949 | Seq ID No 1950 | Seq ID No 1951 | Seq ID No 1952 |
| 3.48 | Seq ID No 1953 | Seq ID No 1954 | Seq ID No 1955 | Seq ID No 1956 |
| 3.49 | Seq ID No 1957 | Seq ID No 1958 | Seq ID No 1959 | Seq ID No 1960 |
| 3.50 | Seq ID No 1961 | Seq ID No 1962 | Seq ID No 1963 | Seq ID No 1964 |
| 3.51 | Seq ID No 1965 | Seq ID No 1966 | Seq ID No 1967 | Seq ID No 1968 |
| 3.52 | Seq ID No 1969 | Seq ID No 1970 | Seq ID No 1971 | Seq ID No 1972 |
| 3.53 | Seq ID No 1973 | Seq ID No 1974 | Seq ID No 1975 | Seq ID No 1976 |
| 3.54 | Seq ID No 1977 | Seq ID No 1978 | Seq ID No 1979 | Seq ID No 1980 |
| 3.55 | Seq ID No 1981 | Seq ID No 1982 | Seq ID No 1983 | Seq ID No 1984 |
| 3.56 | Seq ID No 1985 | Seq ID No 1986 | Seq ID No 1987 | Seq ID No 1988 |
| 3.57 | Seq ID No 1989 | Seq ID No 1990 | Seq ID No 1991 | Seq ID No 1992 |
| 3.58 | Seq ID No 1993 | Seq ID No 1994 | Seq ID No 1995 | Seq ID No 1996 |
| 3.59 | Seq ID No 1997 | Seq ID No 1998 | Seq ID No 1999 | Seq ID No 2000 |
| 3.60 | Seq ID No 2001 | Seq ID No 2002 | Seq ID No 2003 | Seq ID No 2004 |
| 3.61 | Seq ID No 2005 | Seq ID No 2006 | Seq ID No 2007 | Seq ID No 2008 |
| 3.62 | Seq ID No 2009 | Seq ID No 2010 | Seq ID No 2011 | Seq ID No 2012 |
| 3.63 | Seq ID No 2013 | Seq ID No 2014 | Seq ID No 2015 | Seq ID No 2016 |
| 3.64 | Seq ID No 2017 | Seq ID No 2018 | Seq ID No 2019 | Seq ID No 2020 |
| 3.65 | Seq ID No 2021 | Seq ID No 2022 | Seq ID No 2023 | Seq ID No 2024 |
| 3.66 | Seq ID No 2025 | Seq ID No 2026 | Seq ID No 2027 | Seq ID No 2028 |
| 3.67 | Seq ID No 2029 | Seq ID No 2030 | Seq ID No 2031 | Seq ID No 2032 |
| 3.68 | Seq ID No 2033 | Seq ID No 2034 | Seq ID No 2035 | Seq ID No 2036 |
| 3.69 | Seq ID No 2037 | Seq ID No 2038 | Seq ID No 2039 | Seq ID No 2040 |
| 3.70 | Seq ID No 2041 | Seq ID No 2042 | Seq ID No 2043 | Seq ID No 2044 |
| 3.71 | Seq ID No 2045 | Seq ID No 2046 | Seq ID No 2047 | Seq ID No 2048 |
| 3.72 | Seq ID No 2049 | Seq ID No 2050 | Seq ID No 2051 | Seq ID No 2052 |
| 3.73 | Seq ID No 2053 | Seq ID No 2054 | Seq ID No 2055 | Seq ID No 2056 |
| 3.74 | Seq ID No 2057 | Seq ID No 2058 | Seq ID No 2059 | Seq ID No 2060 |
| 3.75 | Seq ID No 2061 | Seq ID No 2062 | Seq ID No 2063 | Seq ID No 2064 |
| 3.76 | Seq ID No 2065 | Seq ID No 2066 | Seq ID No 2067 | Seq ID No 2068 |
| 3.77 | Seq ID No 2069 | Seq ID No 2070 | Seq ID No 2071 | Seq ID No 2072 |
| 3.78 | Seq ID No 2073 | Seq ID No 2074 | Seq ID No 2075 | Seq ID No 2076 |
| 3.79 | Seq ID No 2077 | Seq ID No 2078 | Seq ID No 2079 | Seq ID No 2080 |
| 3.80 | Seq ID No 2081 | Seq ID No 2082 | Seq ID No 2083 | Seq ID No 2084 |
| 3.81 | Seq ID No 2085 | Seq ID No 2086 | Seq ID No 2087 | Seq ID No 2088 |
| 3.82 | Seq ID No 2089 | Seq ID No 2090 | Seq ID No 2091 | Seq ID No 2092 |
| 3.83 | Seq ID No 2093 | Seq ID No 2094 | Seq ID No 2095 | Seq ID No 2096 |
| 3.84 | Seq ID No 2097 | Seq ID No 2098 | Seq ID No 2099 | Seq ID No 2100 |
| 3.85 | Seq ID No 2101 | Seq ID No 2102 | Seq ID No 2103 | Seq ID No 2104 |
| 3.86 | Seq ID No 2105 | Seq ID No 2106 | Seq ID No 2107 | Seq ID No 2108 |
| 3.87 | Seq ID No 2109 | Seq ID No 2110 | Seq ID No 2111 | Seq ID No 2112 |
| 3.88 | Seq ID No 2113 | Seq ID No 2114 | Seq ID No 2115 | Seq ID No 2116 |
| 3.89 | Seq ID No 2117 | Seq ID No 2118 | Seq ID No 2119 | Seq ID No 2120 |
| 3.90 | Seq ID No 2121 | Seq ID No 2122 | Seq ID No 2123 | Seq ID No 2124 |
| 3.91 | Seq ID No 2125 | Seq ID No 2126 | Seq ID No 2127 | Seq ID No 2128 |

[0126] In one aspect, the invention relates to a family 3-like binding molecule comprises a human V_{H} domain comprising a CDR3 sequence comprising SEQ ID NO. 1767 or a sequence with at least 70%, at least 80%, at least 90%, or at least 95% homology thereto.

[0127] In one embodiment, the family 3 or family 3-like binding molecule comprises at least one immunoglobulin single domain antibody directed against IL-17RA wherein said domain is a human V_{H} domain and wherein said V_{H} comprises at least one antigen binding site comprising a CDR3 sequence having SEQ ID NO. 1767 or a sequence with at least 70%, at least 80%, at least 90%, or at least 95% homology thereto. In one embodiment, sequence homology is at least 90%.

[0128] In one embodiment, the CDR3 sequence is selected from one of the CDR3 sequences as shown in table 3 with reference to FIG. 3. Thus, the CDR3 region comprises or consists of a sequence selected form SEQ ID Nos 1767, 1771, 1775, 1779, 1787, 1791, 1795, 1799, 1803, 1807, 1811, 1815, 1819, 1823, 1827, 1831, 1835, 1839, 1843, 1847, 1851, 1855, 1859, 1863, 1867, 1871, 1875, 1879, 1883, 1887, 1891, 1895, 1899, 1903, 1907, 1911, 1915, 1919, 1923, 1927, 1931, 1935, 1939, 1943, 1947, 1951, 1955, 1963, 1967, 1971, 1975, 1979, 1983, 1987, 1991, 1995, 1999, 2003, 2007, 2011, 2015, 2019, 2027, 2031, 2035, 2039, 2043, 2047, 2051, 2055, 2059, 2063, 2067, 2071, 2075, 2079, 2083, 2087, 2091, 2095, 2099, 2103, 2107, 2111, 2115, 2119, 2123 or 2127.

[0129] In one embodiment, the family 3-like sequence comprises at least one antigen binding site comprising hypervariable regions CDR1, CDR2 and CDR3, said CDR1 comprises or consists of the amino acid sequence SEQ ID NO. 1765 or a sequence with at least at least 70%, at least 80%, at least 90%, at least 95% homology thereto, said CDR2 comprises or consists of the amino acid sequence SEQ ID NO. 1766 or a sequence with at least 70%, at least 80%, at least 90%, at least 95% homology thereto, and said CDR3 comprises or consists of the amino acid sequence SEQ ID NO. 1767 or a sequence with at least 70%, at least 80%, at least 90%, at least 95% homology thereto. For example, the CDR sequence may be a sequence selected from those shown in FIG. 3.

[0130] In one embodiment, said CDR1 comprises or consists of the amino acid sequence as shown in SEQ ID NO. 1765 or a sequence with at least 70%, 80%, 81%, 82%, 83%, 84%, 85%, 86%, 87%, 88%, 89%, 90%, 91%, 92%, 93%, 94%, 95% 96%, 97%, 98% or 99% homology thereto. In one embodiment, said CDR2 comprises or consists of the amino acid sequence as shown in SEQ ID NO. 1766 or a sequence with at least 70%, 80%, 81%, 82%, 83%, 84%, 85%, 86%, 87%, 88%, 89%, 90%, 91%, 92%, 93%, 94%, 95% 96%, 97%, 98% or 99% homology thereto. In one embodiment, said CDR3 comprises or consists of the amino acid sequence as shown in SEQ ID NO. 1767 or a sequence with at least 70%, 80%, 81%, 82%, 83%, 84%, 85%, 86%, 87%, 88%, 89%, 90%, 91%, 92%, 93%, 94%, 95% 96%, 97%, 98% or 99% homology thereto.

[0131] In one embodiment, CDR1 comprises or consists of one of the CDR1 amino acid sequence listed above in table 3 with reference to FIG. 3, CDR2 comprises or consists of one of the CDR2 amino acid sequence listed above in table 3 with reference to FIG. 3 and CDR3 comprises or consists of one of the CDR3 amino acid sequence listed above in table 3 with reference to FIG. 3. In one embodiment, the binding molecule has combinations of CDR1, CDR2 and CDR3 as shown for clones 3.1 to 3.91 in FIG. 3.

[0132] In one embodiment, the binding molecule comprises a set of CDR1, CDR2 and CDR3 sequences of a V_{H} sequence as shown for clones 3.1 to 3.91 in FIG. 3. In one embodiment, the binding molecule has a set of CDR1, CDR2 and CDR3 sequences of a V_{H} sequence as shown for clones 3.1 in FIG. 3.

[0133] In one embodiment, CDR1 is SEQ ID NO. 1765, CDR2 is SEQ ID No. 1766 and CDR3 is SEQ ID NO. 1767.

[0134] In one embodiment, the family 3 or family 3-like binding molecule has a V_{H} domain that comprises or consists of SEQ ID NO. 1768 or a sequence with at least 40%, 50%, 60%, 70%, 80%, 81%, 82%, 83%, 84%, 85%, 86%, 87%, 88%, 89%, 90%, 91%, 92%, 93%, 94%, 95% 96%, 97%, 98% or 99% homology thereto. CDR sequences of such sequences are shown in FIG. 3. For example, the V_{H} domain comprises or consists of one of the V_{H} amino acid sequences listed above for clones 3.1 to 3.91 in table 3 with reference to FIG. 3. In one embodiment, the V_{H} sequence is selected from 1768, 1772, 1776, 1780, 1784, 1788, 1792, 1796, 1800, 1804, 1808, 1812, 1816, 1820, 1824, 1828, 1832, 1836, 1840, 1844, 1848, 1852, 1856, 1860, 1864, 1868, 1876, 1880, 1884, 1888, 1892, 1896, 1900, 1904, 1908, 1912, 1916, 1920, 1924, 1928, 1932, 1936, 1940, 1944, 1948, 1956, 1964, 1968, 1972, 1976, 1980, 1984, 1988, 1992, 1996, 2000, 2004, 2008, 2012, 2016, 2020, 2024, 2028, 2032, 2036, 2040, 2044, 2048, 2052, 2056, 2060, 2064, 2068, 2072, 2084, 2088, 2092, 2096, 2100, 2104, 2108, 2112, 2116, 2120 or 2128.

[0135] In another embodiment, the V_{H} domain comprises a sequence selected from one of the sequences in the forgoing but comprises 1, 2, 3, 4, 5, 6, 7, 8, 9 or 10 amino acid substitutions. In one embodiment, these are in the framework region. In another embodiment, these are in the CDRs. In one embodiment, the amino acid substitutions are in the framework and CDR sequences. In one embodiment, the V_{H} domain comprises or consists of SEQ ID NO. 1767 or a sequence which comprises one or more amino acid substitutions, for example 1, 2, 3, 4, 5, 6, 7, 8, 9 or 10 amino acid substitutions.

[0136] In another aspect, the invention relates to a binding molecule comprising or consisting of a V_{H} domain as shown in SEQ ID NO. 1768 or a variant thereof comprising amino acid substitutions compared to SEQ ID NO. 1768 as follows: residue 1 is Q, residue 31 is S, residue 36 is S, T, residue 51 is M, residue 52 is K, residue 53 is H, E, residue 59 is Q, N, residue 99 is A, residue 100 is W, residue 101 is S, residue 102 is G and/or residue 106 is D.

[0137] The family 3 or family 3-like binding molecules have KD, Koff, KA, Kd and IC₅₀ values as further described herein and as shown in the examples.

[0138] In one aspect, the invention relates to a binding molecule capable of binding human IL-17RA comprising a human V_{H} domain wherein said V_{H} domain comprises a family 4 or family 4-like sequence.

[0139] In one embodiment, the binding molecule comprises or consists of at least one immunoglobulin single domain antibody directed against IL-17RA, preferably human IL-17RA, wherein said domain is a human V_{H} domain and wherein said V_{H} domain comprises a family 4 or family 4-like sequence. These include the V_{H} sequence of the parent clone (clone 4.1; Seq ID No 2132) or a part thereof, for example a CDR3 sequence, and V_{H} sequences of clones or parts thereof that are derived from the parent clone 4.1 through a process of optimization, for example as shown in FIG. 4. CDR sequences and full length sequences of clones in family 4 are numbered according to table 4 as shown below.

TABLE 4
Family 4 CDR sequences and V_{H} sequences that are within the scope
of the invention. Corresponding sequences are shown in FIG. 4.

| CLONE | CDR1 | CDR2 | CDR3 | FULL LENGTH |
|---|---|---|---|---|
| 4.1 | Seq ID No 2129 | Seq ID No 2130 | Seq ID No 2131 | Seq ID No 2132 |
| 4.2 | Seq ID No 2133 | Seq ID No 2134 | Seq ID No 2135 | Seq ID No 2136 |
| 4.3 | Seq ID No 2137 | Seq ID No 2138 | Seq ID No 2139 | Seq ID No 2140 |
| 4.4 | Seq ID No 2141 | Seq ID No 2142 | Seq ID No 2143 | Seq ID No 2144 |
| 4.5 | Seq ID No 2145 | Seq ID No 2146 | Seq ID No 2147 | Seq ID No 2148 |
| 4.6 | Seq ID No 2149 | Seq ID No 2150 | Seq ID No 2151 | Seq ID No 2152 |
| 4.7 | Seq ID No 2153 | Seq ID No 2154 | Seq ID No 2155 | Seq ID No 2156 |
| 4.8 | Seq ID No 2157 | Seq ID No 2158 | Seq ID No 2159 | Seq ID No 2160 |
| 4.9 | Seq ID No 2161 | Seq ID No 2162 | Seq ID No 2163 | Seq ID No 2164 |
| 4.10 | Seq ID No 2165 | Seq ID No 2166 | Seq ID No 2167 | Seq ID No 2168 |
| 4.11 | Seq ID No 2169 | Seq ID No 2170 | Seq ID No 2171 | Seq ID No 2172 |
| 4.12 | Seq ID No 2173 | Seq ID No 2174 | Seq ID No 2175 | Seq ID No 2176 |
| 4.13 | Seq ID No 2177 | Seq ID No 2178 | Seq ID No 2179 | Seq ID No 2180 |
| 4.14 | Seq ID No 2181 | Seq ID No 2182 | Seq ID No 2183 | Seq ID No 2184 |
| 4.15 | Seq ID No 2185 | Seq ID No 2186 | Seq ID No 2187 | Seq ID No 2188 |
| 4.16 | Seq ID No 2189 | Seq ID No 2190 | Seq ID No 2191 | Seq ID No 2192 |
| 4.17 | Seq ID No 2193 | Seq ID No 2194 | Seq ID No 2195 | Seq ID No 2196 |
| 4.18 | Seq ID No 2197 | Seq ID No 2198 | Seq ID No 2199 | Seq ID No 2200 |
| 4.19 | Seq ID No 2201 | Seq ID No 2202 | Seq ID No 2203 | Seq ID No 2204 |
| 4.20 | Seq ID No 2205 | Seq ID No 2206 | Seq ID No 2207 | Seq ID No 2208 |
| 4.21 | Seq ID No 2209 | Seq ID No 2210 | Seq ID No 2211 | Seq ID No 2212 |
| 4.22 | Seq ID No 2213 | Seq ID No 2214 | Seq ID No 2215 | Seq ID No 2216 |
| 4.23 | Seq ID No 2217 | Seq ID No 2218 | Seq ID No 2219 | Seq ID No 2220 |
| 4.24 | Seq ID No 2221 | Seq ID No 2222 | Seq ID No 2223 | Seq ID No 2224 |
| 4.25 | Seq ID No 2225 | Seq ID No 2226 | Seq ID No 2227 | Seq ID No 2228 |
| 4.26 | Seq ID No 2229 | Seq ID No 2230 | Seq ID No 2231 | Seq ID No 2232 |
| 4.27 | Seq ID No 2233 | Seq ID No 2234 | Seq ID No 2235 | Seq ID No 2236 |
| 4.28 | Seq ID No 2237 | Seq ID No 2238 | Seq ID No 2239 | Seq ID No 2240 |
| 4.29 | Seq ID No 2241 | Seq ID No 2242 | Seq ID No 2243 | Seq ID No 2244 |
| 4.30 | Seq ID No 2245 | Seq ID No 2246 | Seq ID No 2247 | Seq ID No 2248 |
| 4.31 | Seq ID No 2249 | Seq ID No 2250 | Seq ID No 2251 | Seq ID No 2252 |
| 4.32 | Seq ID No 2253 | Seq ID No 2254 | Seq ID No 2255 | Seq ID No 2256 |
| 4.33 | Seq ID No 2257 | Seq ID No 2258 | Seq ID No 2259 | Seq ID No 2260 |
| 4.34 | Seq ID No 2261 | Seq ID No 2262 | Seq ID No 2263 | Seq ID No 2264 |
| 4.35 | Seq ID No 2265 | Seq ID No 2266 | Seq ID No 2267 | Seq ID No 2268 |
| 4.36 | Seq ID No 2269 | Seq ID No 2270 | Seq ID No 2271 | Seq ID No 2272 |
| 4.37 | Seq ID No 2273 | Seq ID No 2274 | Seq ID No 2275 | Seq ID No 2276 |
| 4.38 | Seq ID No 2277 | Seq ID No 2278 | Seq ID No 2279 | Seq ID No 2280 |
| 4.39 | Seq ID No 2281 | Seq ID No 2282 | Seq ID No 2283 | Seq ID No 2284 |
| 4.40 | Seq ID No 2285 | Seq ID No 2286 | Seq ID No 2287 | Seq ID No 2288 |
| 4.41 | Seq ID No 2289 | Seq ID No 2290 | Seq ID No 2291 | Seq ID No 2292 |
| 4.42 | Seq ID No 2293 | Seq ID No 2294 | Seq ID No 2295 | Seq ID No 2296 |
| 4.43 | Seq ID No 2297 | Seq ID No 2298 | Seq ID No 2299 | Seq ID No 2300 |
| 4.44 | Seq ID No 2301 | Seq ID No 2302 | Seq ID No 2303 | Seq ID No 2304 |
| 4.45 | Seq ID No 2305 | Seq ID No 2306 | Seq ID No 2307 | Seq ID No 2308 |
| 4.46 | Seq ID No 2309 | Seq ID No 2310 | Seq ID No 2311 | Seq ID No 2312 |
| 4.47 | Seq ID No 2313 | Seq ID No 2314 | Seq ID No 2315 | Seq ID No 2316 |
| 4.48 | Seq ID No 2317 | Seq ID No 2318 | Seq ID No 2319 | Seq ID No 2320 |
| 4.49 | Seq ID No 2321 | Seq ID No 2322 | Seq ID No 2323 | Seq ID No 2324 |
| 4.50 | Seq ID No 2325 | Seq ID No 2326 | Seq ID No 2327 | Seq ID No 2328 |
| 4.51 | Seq ID No 2329 | Seq ID No 2330 | Seq ID No 2331 | Seq ID No 2332 |
| 4.52 | Seq ID No 2333 | Seq ID No 2334 | Seq ID No 2335 | Seq ID No 2336 |
| 4.53 | Seq ID No 2337 | Seq ID No 2338 | Seq ID No 2339 | Seq ID No 2340 |
| 4.54 | Seq ID No 2341 | Seq ID No 2342 | Seq ID No 2343 | Seq ID No 2344 |
| 4.55 | Seq ID No 2345 | Seq ID No 2346 | Seq ID No 2347 | Seq ID No 2348 |
| 4.56 | Seq ID No 2349 | Seq ID No 2350 | Seq ID No 2351 | Seq ID No 2352 |
| 4.57 | Seq ID No 2353 | Seq ID No 2354 | Seq ID No 2355 | Seq ID No 2356 |
| 4.58 | Seq ID No 2357 | Seq ID No 2358 | Seq ID No 2359 | Seq ID No 2360 |
| 4.59 | Seq ID No 2361 | Seq ID No 2362 | Seq ID No 2363 | Seq ID No 2364 |
| 4.60 | Seq ID No 2365 | Seq ID No 2366 | Seq ID No 2367 | Seq ID No 2368 |
| 4.61 | Seq ID No 2369 | Seq ID No 2370 | Seq ID No 2371 | Seq ID No 2372 |
| 4.62 | Seq ID No 2373 | Seq ID No 2374 | Seq ID No 2375 | Seq ID No 2376 |
| 4.63 | Seq ID No 2377 | Seq ID No 2378 | Seq ID No 2379 | Seq ID No 2380 |
| 4.64 | Seq ID No 2381 | Seq ID No 2382 | Seq ID No 2383 | Seq ID No 2384 |
| 4.65 | Seq ID No 2385 | Seq ID No 2386 | Seq ID No 2387 | Seq ID No 2388 |
| 4.66 | Seq ID No 2389 | Seq ID No 2390 | Seq ID No 2391 | Seq ID No 2392 |
| 4.67 | Seq ID No 2393 | Seq ID No 2394 | Seq ID No 2395 | Seq ID No 2396 |
| 4.68 | Seq ID No 2397 | Seq ID No 2398 | Seq ID No 2399 | Seq ID No 2400 |
| 4.69 | Seq ID No 2401 | Seq ID No 2402 | Seq ID No 2403 | Seq ID No 2404 |
| 4.70 | Seq ID No 2405 | Seq ID No 2406 | Seq ID No 2407 | Seq ID No 2408 |
| 4.71 | Seq ID No 2409 | Seq ID No 2410 | Seq ID No 2411 | Seq ID No 2412 |
| 4.72 | Seq ID No 2413 | Seq ID No 2414 | Seq ID No 2415 | Seq ID No 2416 |
| 4.73 | Seq ID No 2417 | Seq ID No 2418 | Seq ID No 2419 | Seq ID No 2420 |
| 4.74 | Seq ID No 2421 | Seq ID No 2422 | Seq ID No 2423 | Seq ID No 2424 |
| 4.75 | Seq ID No 2425 | Seq ID No 2426 | Seq ID No 2427 | Seq ID No 2428 |
| 4.76 | Seq ID No 2429 | Seq ID No 2430 | Seq ID No 2431 | Seq ID No 2432 |
| 4.77 | Seq ID No 2433 | Seq ID No 2434 | Seq ID No 2435 | Seq ID No 2436 |
| 4.78 | Seq ID No 2437 | Seq ID No 2438 | Seq ID No 2439 | Seq ID No 2440 |
| 4.79 | Seq ID No 2441 | Seq ID No 2442 | Seq ID No 2443 | Seq ID No 2444 |
| 4.80 | Seq ID No 2445 | Seq ID No 2446 | Seq ID No 2447 | Seq ID No 2448 |
| 4.81 | Seq ID No 2449 | Seq ID No 2450 | Seq ID No 2451 | Seq ID No 2452 |
| 4.82 | Seq ID No 2453 | Seq ID No 2454 | Seq ID No 2455 | Seq ID No 2456 |
| 4.83 | Seq ID No 2457 | Seq ID No 2458 | Seq ID No 2459 | Seq ID No 2460 |
| 4.84 | Seq ID No 2461 | Seq ID No 2462 | Seq ID No 2463 | Seq ID No 2464 |
| 4.85 | Seq ID No 2465 | Seq ID No 2466 | Seq ID No 2467 | Seq ID No 2468 |
| 4.86 | Seq ID No 2469 | Seq ID No 2470 | Seq ID No 2471 | Seq ID No 2472 |
| 4.87 | Seq ID No 2473 | Seq ID No 2474 | Seq ID No 2475 | Seq ID No 2476 |
| 4.88 | Seq ID No 2477 | Seq ID No 2478 | Seq ID No 2479 | Seq ID No 2480 |
| 4.89 | Seq ID No 2481 | Seq ID No 2482 | Seq ID No 2483 | Seq ID No 2484 |
| 4.90 | Seq ID No 2485 | Seq ID No 2486 | Seq ID No 2487 | Seq ID No 2488 |
| 4.91 | Seq ID No 2489 | Seq ID No 2490 | Seq ID No 2491 | Seq ID No 2492 |
| 4.92 | Seq ID No 2493 | Seq ID No 2494 | Seq ID No 2495 | Seq ID No 2496 |
| 4.93 | Seq ID No 2497 | Seq ID No 2498 | Seq ID No 2499 | Seq ID No 2500 |
| 4.94 | Seq ID No 2501 | Seq ID No 2502 | Seq ID No 2503 | Seq ID No 2504 |
| 4.95 | Seq ID No 2505 | Seq ID No 2506 | Seq ID No 2507 | Seq ID No 2508 |
| 4.96 | Seq ID No 2509 | Seq ID No 2510 | Seq ID No 2511 | Seq ID No 2512 |
| 4.97 | Seq ID No 2513 | Seq ID No 2514 | Seq ID No 2515 | Seq ID No 2516 |
| 4.98 | Seq ID No 2517 | Seq ID No 2518 | Seq ID No 2519 | Seq ID No 2520 |
| 4.99 | Seq ID No 2521 | Seq ID No 2522 | Seq ID No 2523 | Seq ID No 2524 |
| 4.100 | Seq ID No 2525 | Seq ID No 2526 | Seq ID No 2527 | Seq ID No 2528 |
| 4.101 | Seq ID No 2529 | Seq ID No 2530 | Seq ID No 2531 | Seq ID No 2532 |
| 4.102 | Seq ID No 2533 | Seq ID No 2534 | Seq ID No 2535 | Seq ID No 2536 |
| 4.103 | Seq ID No 2537 | Seq ID No 2538 | Seq ID No 2539 | Seq ID No 2540 |
| 4.104 | Seq ID No 2541 | Seq ID No 2542 | Seq ID No 2543 | Seq ID No 2544 |
| 4.105 | Seq ID No 2545 | Seq ID No 2546 | Seq ID No 2547 | Seq ID No 2548 |
| 4.106 | Seq ID No 2549 | Seq ID No 2550 | Seq ID No 2551 | Seq ID No 2552 |
| 4.107 | Seq ID No 2553 | Seq ID No 2554 | Seq ID No 2555 | Seq ID No 2556 |

[0140] In one aspect of the invention, the family 4 or family 4-like binding molecule comprises a human V_{H} domain comprising a hypervariable region CDR3 said CDR3 having the amino acid sequence SEQ ID NO. 2131, or a sequence having at least 70%, at least 80%, at least 90%, or at least 95% homology to SEQ ID NO. 2131.

[0141] In one embodiment, the family 4 or family 4-like binding molecule comprises a binding molecule comprising or consisting of at least one immunoglobulin single domain antibody directed against IL-17R wherein said domain is a human V_{H} domain and wherein said V_{H} domain comprises hypervariable region CDR3 said CDR3 having the amino acid sequence SEQ ID NO. 2131, or a sequence having at least 70%, at least 80%, at least 90%, or at least 95% homology thereto. In one embodiment, sequence homology is at least 90%.

[0142] In one embodiment, the CDR3 region is selected from one of the CDR3 sequence as shown in table 4 with reference to FIG. 4. Thus, the CDR3 sequence is selected from SEQ ID Nos: 2131, 2135, 2139, 2143, 2147, 2151, 2155, 2159, 2163, 2167, 2171, 2175, 2179, 2183, 2187, 2191, 2195, 2199, 2203, 2207, 2211, 2215, 2219, 2223, 2227, 2231, 2235, 2239, 2243, 2247, 2251, 2255, 2259, 2263, 2267, 2271, 2275, 2279, 2283, 2287, 2291, 2295, 2299, 2303, 2307, 2311, 2315, 2319, 2323, 2327, 2331, 2335, 2339, 2343, 2347, 2351, 2355, 2359, 2363, 2367, 2371, 2375, 2379, 2383, 2387, 2391, 2395, 2399, 2403, 2407, 2411, 2415, 2419, 2423, 2427, 2435, 2439, 2443, 2447, 2451, 2455, 2459, 2463, 2467, 2471, 2475, 2479, 2483, 2487, 2491, 2495, 2499, 2503, 2507, 2511, 2515, 2519, 2523, 2527, 2531, 2535, 2539, 2543, 2551 or 2555.

[0143] In one embodiment, the family 4 or family 4-like binding molecule comprises at least one antigen binding site comprising hypervariable regions CDR1, CDR2 and CDR3, said CDR1 comprises or consists of the amino acid sequence SEQ ID NO. 2129 or a sequence with at least 70%, at least 80%, at least 90%, or at least 95% homology thereto, said CDR2 comprises or consists of the amino acid sequence SEQ ID NO. 2130 or a sequence with at least 70%, at least 80%, at least 90%, or at least 95% homology thereto, and said CDR3 comprises or consists of the amino acid sequence SEQ ID NO. 2131, or a sequence with at least 70%, at least 80%, at least 90%, or at least 95% homology thereto. For example, the CDR sequence may be a CDR sequence selected form those shown in FIG. 4.

[0144] In one embodiment, said CDR1 comprises or consists of the amino acid sequence as shown in SEQ ID NO. 2129 or a sequence with at least 70%, 80%, 81%, 82%, 83%, 84%, 85%, 86%, 87%, 88%, 89%, 90%, 91%, 92%, 93%, 94%, 95% 96%, 97%, 98% or 99% homology thereto. In one embodiment, said CDR2 comprises or consists of the amino acid sequence as shown in SEQ ID NO. 2130 or a sequence with at least 70%, 80%, 81%, 82%, 83%, 84%, 85%, 86%, 87%, 88%, 89%, 90%, 91%, 92%, 93%, 94%, 95% 96%, 97%, 98% or 99% homology thereto. In one embodiment, said CDR3 comprises or consists of the amino acid sequence as shown in SEQ ID NO. 2131 or a sequence with at least 70%, 80%, 81%, 82%, 83%, 84%, 85%, 86%, 87%, 88%, 89%, 90%, 91%, 92%, 93%, 94%, 95% 96%, 97%, 98% or 99% homology thereto.

[0145] In one embodiment, CDR1 comprises or consists of one of the CDR1 amino acid sequence listed above in table 4 with reference to FIG. 4, CDR2 comprises or consists of one of the CDR2 amino acid sequence listed above in table 4 with reference to FIG. 4 and CDR3 comprises or consists of one of the CDR3 amino acid sequence listed above in table 4 with reference to FIG. 4. In one embodiment, the binding molecule has combinations of CDR1, CDR2 and CDR3 as shown for clones 4.1 to 4.107 in FIG. 4. In one embodiment, the binding molecule comprises a set of CDR1, CDR2 and CDR2 sequences of a V_{H} sequence as shown for clones 4.1 to 4.107 in FIG. 4. In one embodiment, the binding molecule has a set of CDR1, CDR2 and CDR2 sequences of a V_{H} sequence as shown for clone 4.1 in FIG. 4.

[0146] In one embodiment, the family 4 or family 4-like binding molecule has a V_{H} domain that comprises or consists of SEQ ID NO. 2132 or a sequence with at least 50%, 60%, 70%, 80%, 81%, 82%, 83%, 84%, 85%, 87%, 88%, 89%, 90%, 91%, 92%, 93%, 94%, 96%, 97%, 98%, 99% homology thereto. CDR sequences of such V_{H} sequences are shown in FIG. 4. For example, the V_{H} domain comprises or consists of one of the V_{H} amino acid sequences listed above for clones 41.1 to 4.107 in FIG. 4 and table 4. Thus, the V_{H} sequence comprises or consists of a V_{H} sequence selected from SEQ ID NOs. 2132, 2136, 2140, 2144, 2148, 2152, 2156, 2160, 2164, 2168, 2172, 2184, 2188, 2192, 2196, 2200, 2204, 2208, 2212, 2216, 2220, 2224, 2228, 2232, 2236, 2240, 2244, 2248, 2252, 2256, 2260, 2264, 2268, 2272, 2276, 2280, 2284, 2288, 2292, 2300, 2304, 2308, 2312, 2316, 2320, 2324, 2328, 2332, 2336, 2340, 2344, 2348, 2352, 2356, 2360, 2364, 2368, 2372, 2376, 2380, 2384, 2388, 2392, 2396, 2400, 2404, 2408, 2412, 2416, 2420, 2424, 2428, 2432, 2436, 2440, 2444, 2452, 2456, 2460, 2468, 2472, 2476, 2480, 2484, 2488, 2492, 2496, 2500, 2504, 2508, 2512, 2516, 2520, 2524, 2528, 2532, 2536, 2540, 2544, 2548, 2552 or 2556.

[0147] In another embodiment, the V_{H} domain comprises a sequence selected from one of the sequences in the forgoing, but comprises 1, 2, 3, 4, 5, 6, 7, 8, 9 or 10 amino acid substitutions. In one embodiment, these are in the framework region. In another embodiment, these are in the CDR. In one embodiment, the amino acid substitutions are in the framework and CDR sequences. In one embodiment, the V_{H} domain comprises or consists of SEQ ID NO. 2132 or a sequence which comprises one or more amino acid substitutions, for example 1, 2, 3, 4, 5, 6, 7, 8, 9 or 10 amino acid substitutions.

[0148] In another aspect, the invention relates to a binding molecule comprising or consisting of a V_{H} domain as shown in SEQ ID NO. 2132 or a variant thereof comprising amino acid substitutions compared to SEQ ID NO. 2132 as follows residue 5 is Q, residue 10 is G, residue 28 is T, residue 31 is S, G, residue 32 is H, residue 33 is I, G, V, residue 37 is V, M, residue 51 is I, residue 54 is N, K, E, residue 55 is N, residue 61 is S, T, residue 66 is D, residue 100 is D, residue 101 is S, F, residue 102 is G, residue 103 is S and/or residue 106 is Q, T.

[0149] The family 4 or family 4-like binding molecules have KD, Koff, KA, Kd and IC₅₀ values as further described herein and as shown in the examples.

[0150] In one aspect, the invention relates to a binding molecule capable of binding human IL-17RA comprising a human V_{H} domain wherein said V_{H} domain comprises a family 5 or family 5-like sequence.

[0151] In one embodiment, the binding molecule comprises or consists of at least one immunoglobulin single domain antibody directed against IL-17RA, preferably human IL-17RA, wherein said domain is a human V_{H} domain and wherein said V_{H} domain comprises a family 5 or family 5-like sequence. These include the V_{H} sequence of the parent clone (clone 5.1; SEQ ID NO. 2560) or a part thereof, for example a CDR3 sequence, and V_{H} sequences of clones that are derived from the parent clone 5.1 through a process of optimization, for example as shown in FIG. 5.

[0152] CDR sequences and full length sequences of clones in family 5 are numbered according to table 5 as shown below.

TABLE 5
Family 5 CDR sequences and V_{H} sequences that are within the scope
of the invention. Corresponding sequences are shown in FIG. 5.

| Clone | | | | Full length VH |
|---|---|---|---|---|
| name | CDR1 SEQ ID NO. | CDR2 SEQ ID NO. | CDR3 SEQ ID NO. | sequence SEQ ID NO. |
| 5.1 | SEQ ID NO. 2557 | SEQ ID NO. 2558 | SEQ ID NO. 2559 | SEQ ID NO. 2560 |
| 5.2 | SEQ ID NO. 2561 | SEQ ID NO. 2562 | SEQ ID NO. 2563 | SEQ ID NO. 2564 |
| 5.3 | SEQ ID NO. 2565 | SEQ ID NO. 2566 | SEQ ID NO. 2567 | SEQ ID NO. 2568 |
| 5.4 | SEQ ID NO. 2569 | SEQ ID NO. 2570 | SEQ ID NO. 2571 | SEQ ID NO. 2572 |

[0153] In one aspect of the invention, the family 5 or family 5-like binding molecule comprises a human V_{H} domain comprising a CDR3 sequence comprising amino acid sequence SEQ ID NO. 2559, or a sequence having at least 70%, at least 80%, at least 90%, or at least 95% homology thereto.

[0154] In one embodiment, the family 5 or family 5-like binding molecule comprises at least one immunoglobulin single domain antibody directed against IL-17R wherein said domain is a human V_{H} domain and wherein said V_{H} comprises at least one antigen binding site comprising hypervariable region CDR3 said CDR3 having the amino acid sequence SEQ ID NO. 2559, or a sequence having at least 70%, at least 80%, at least 90%, or at least 95% homology thereto.

[0155] In one embodiment, the homology is at least 90%.

[0156] In one embodiment, the CDR3 sequence is selected from one of the CDR3 sequences as shown in table 5 with reference to FIG. 5. Thus, the CDR3 sequence is selected from 2559, 2563, 2567 or 2571.

[0157] In one embodiment, the family 5 or family 5-like sequence comprises a binding molecule comprising hypervariable regions CDR1, CDR2 and CDR3, said CDR1 comprises or consists of the amino acid sequence SEQ ID NO. 2557 or a sequence with at least 70%, at least 80%, at least 90%, or at least 95% homology thereto, said CDR2 comprises or consists of the amino acid sequence SEQ ID NO. 2558 or a sequence with at least 70%, at least 80%, at least 90%, or at least 95% homology thereto, and said CDR3 comprises or consists of the amino acid sequence SEQ ID NO. 2559, or a sequence with at least 70%, at least 80%, at least 90%, or at least 95% homology thereto. For example, the CDR sequence may be a CDR sequence selected from those shown in FIG. 5.

[0158] In one embodiment, said CDR1 comprises or consists of the amino acid sequence as shown in SEQ ID NO. 2557 or a sequence with at least 70%, 80%, 81%, 82%, 83%, 84%, 85%, 87%, 88%, 89%, 90%, 91%, 92%, 93%, 94%, 96%, 97%, 98%, 99% homology thereto. In one embodiment, said CDR2 comprises or consists of the amino acid sequence as shown in SEQ ID NO. 2558 or a sequence with at least 70%, 80%, 81%, 82%, 83%, 84%, 85%, 86%, 87%, 88%, 89%, 90%, 91%, 92%, 93%, 94%, 95% 96%, 97%, 98% or 99% homology thereto. In one embodiment, said CDR3 comprises or consists of the amino acid sequence as shown in SEQ ID NO. 2559 or a sequence with at least 70%, 80%, 81%, 82%, 83%, 84%, 85%, 86%, 87%, 88%, 89%, 90%, 91%, 92%, 93%, 94%, 95% 96%, 97%, 98% or 99% homology thereto.

[0159] In one embodiment, CDR1 comprises or consists of one of the CDR1 amino acid sequence listed above in table 5 with reference to FIG. 5, CDR2 comprises or consists of one of the CDR2 amino acid sequence listed above in table 5 with reference to FIG. 5 and CDR3 comprises or consists of one of the CDR3 amino acid sequence listed above in table 5 with reference to FIG. 5. In one embodiment, the binding molecule has combinations of CDR1, CDR2 and CDR3 as shown for clones 5.1 to 5.4 in FIG. 5. In one embodiment, the binding molecule comprises a set of CDR1, CDR2 and CDR3 sequences of a V_{H} sequence as shown for clones 5.1 to 5.4 in FIG. 5.

[0160] In one embodiment, the family 5 or family 5-like binding molecule has a V_{H} domain that comprises or consists of SEQ ID NO. 2560 or a sequence with at least 40%, 50%, 60%, 70%, 80%, 81%, 82%, 83%, 84%, 85%, 86%, 87%, 88%, 89%, 90%, 91%, 92%, 93%, 94%, 95% 96%, 97%, 98% or 99% homology thereto. Thus, the V_{H} comprises or consist of a V_{H} selected form SEQ ID Nos. 2560, 2564, 2568 or 2572. In another embodiment, the V_{H} domain comprises a sequence selected from one of the sequences in the forgoing but comprises 1, 2, 3, 4, 5, 6, 7, 8, 9 or 10 amino acid substitutions. In one embodiment, these are in the framework region. In another embodiment, these are in the CDRs. In one embodiment, the amino acid substitutions are in the framework and CDR sequences. In one embodiment, the V_{H} domain comprises or consists of SEQ ID NO. 2560 or a sequence which comprises one or more amino acid substitutions, for example 1, 2, 3, 4, 5, 6, 7, 8, 9 or 10 amino acid substitutions.

[0161] In another aspect, the invention relates to a binding molecule comprising or consisting of a V_{H} domain as shown in SEQ ID NO. 2132 or a variant thereof comprising amino acid substitutions compared to SEQ ID NO. 2132 as follows residue 1 is Q, residue 32 is Y, residue 33 is Y, residue 52 is G, residue 53 is G, residue 56 is D, residue 57 is V, residue 103 is H, residue 104 is D and/or residue 106 is K.

[0162] The family 5 or family 5-like binding molecules have KD, Koff, KA, Kd and IC₅₀ values as further described herein and as shown in the examples.

[0163] In another aspect, the invention relates to a binding molecule capable of binding human IL-17RA comprising a human V_{H} domain wherein said V_{H} domain comprises a family 6 or family 6-like sequence.

[0164] In one embodiment, the binding molecule comprises or consists of at least one immunoglobulin single domain antibody directed against IL-17RA, preferably human IL-17RA, wherein said domain is a human v domain and wherein said V_{H} domain comprises a family 6 or family 6-like sequence. These include the V_{H} sequence of the parent clone (clone 6.1; SEQ ID NO. 2576) or a part thereof, for example a CDR3 sequence, and V_{H} sequences of clones or that are derived from the parent clone 6.1 through a process of optimization, for example as shown in FIG. 6. CDR sequences and full length sequences of clones in family 6 are numbered according to table 6 as shown below.

TABLE 6
Family 6 CDR sequences and V_{H} sequences that are within the scope
of the invention. Corresponding sequences are shown in FIG. 6.

| Clone | | | | Full length |
|---|---|---|---|---|
| name | CDR1 | CDR2 | CDR3 | sequence |
| 6.1 | SEQ ID NO. | SEQ ID NO. | SEQ ID NO. | SEQ ID NO. |
| | 2573 | 2574 | 2575 | 2576 |

[0165] In one aspect, the invention relates to a family 6 or family 6-like binding molecule comprises a human V_{H} domain comprising a CDR3 sequence CDR3 comprising the amino acid sequence SEQ ID NO. 2575, or a sequence having at least 70%, at least 80%, at least 90%, or at least 95% homology thereto.

[0166] In one embodiment, the family 6 or family 6-like binding molecule comprises at least one immunoglobulin single domain antibody directed against IL-17R comprising at least one antigen binding site comprising hypervariable region CDR3 said CDR3 having the amino acid sequence SEQ ID NO. 2575, or a sequence having at least 70%, at least 80%, at least 90%, or at least 95% homology thereto. In one embodiment, the homology is at least 90%.

[0167] In one embodiment, the family 6 or family 6-like binding molecule comprises hypervariable regions CDR1, CDR2 and CDR3, said CDR1 comprises or consists of the amino acid sequence SEQ ID NO. 2573 or a sequence with at least 70%, at least 80%, at least 90%, or at least 95% homology thereto, said CDR2 comprises or consists of the amino acid sequence SEQ ID NO. 2574 or a sequence with at least 70%, at least 80%, at least 90%, or at least 95% homology thereto, and said CDR3 comprises or consists of the amino acid sequence SEQ ID NO. 2575, or a sequence with at least 80%, at least 90%, or at least 95% homology thereto.

[0168] In one embodiment, said CDR1 comprises or consists of the amino acid sequence SEQ ID NO. 2573 or a sequence with at least 70%, 80%, 81%, 82%, 83%, 84%, 85%, 86%, 87%, 88%, 89%, 90%, 91%, 92%, 93%, 94%, 95% 96%, 97%, 98% or 99% homology thereto. In one embodiment, said CDR2 comprises or consists of the amino acid sequence SEQ ID NO. 2574 or a sequence with at least 70%, 80%, 81%, 82%, 83%, 84%, 85%, 86%, 87%, 88%, 89%, 90%, 91%, 92%, 93%, 94%, 95%, 96%, 97%, 98% or 99% homology thereto. In one embodiment, said CDR3 comprises or consists of the amino acid sequence SEQ ID NO. 2575 or a sequence with at least 70%, 80%, 81%, 82%, 83%, 84%, 85%, 86%, 87%, 88%, 89%, 90%, 91%, 92%, 93%, 94%, 95%, 96%, 97%, 98% or 99% homology thereto.

[0169] In one embodiment, the family 6 or family 6-like binding molecule has a V_{H} domain that comprises or consists of SEQ ID NO. 2576 or a sequence with at least 40%, 50%, 60%, 70%, 80%, 80%, 81%, 82%, 83%, 84%, 85%, 86%, 87%, 88%, 89%, 90%, 91%, 92%, 93%, 94%, 95% 96%, 97%, 98% or 99% homology thereto.

[0170] In another embodiment, the V_{H} domain comprises SEQ ID NO. 2576, but comprises 1, 2, 3, 4, 5, 6, 7, 8, 9 or 10 amino acid substitutions. In one embodiment, these are in the framework region. In another embodiment, these are in the CDRs. In one embodiment, the amino acid substitutions are in the framework and CDR sequences.

[0171] The family 6 or family 6-like binding molecules have KD, Koff, KA, Kd and IC₅₀ values as further described herein and as shown in the examples.

[0172] In another aspect, the invention relates to a binding molecule capable of binding human IL-17RA comprising a human V_{H} domain wherein said V_{H} domain comprises a family 7 or family 7-like sequence.

[0173] In one embodiment, the binding molecule comprises or consists of at least one immunoglobulin single domain antibody directed against IL-17RA, preferably human IL-17RA, wherein said domain is a human V_{H} domain and wherein said V_{H} domain comprises a family 7 or family 7-like sequence. These include the V_{H} sequence of the parent clone (clone 7.1; SEQ ID NO. 2580) or a part thereof, for example a CDR3 sequence, and V_{H} sequences of clones or parts thereof that are derived from the parent clone 7.1 through a process of optimization, for example as shown in FIG. 7. CDR sequences and full length sequences of clones in family 7 are numbered according to table 7 as shown below.

TABLE 7
Family 7 CDR sequences and V_{H} sequences that are within the scope
of the invention. Corresponding sequences are shown in FIG. 7.

| Clone | | | | Full length |
|---|---|---|---|---|
| name | CDR1 | CDR2 | CDR3 | sequence |
| 7.1 | SEQ ID NO. | SEQ ID NO. | SEQ ID NO. | SEQ ID NO. |
| | 2577 | 2578 | 2579 | 2580 |

[0174] In one aspect, the invention relates to a family 7 or family 7-like binding molecule comprises a human V_{H} domain comprising a CDR3 sequence CDR3 comprising the amino acid sequence SEQ ID NO. 2579, or a sequence having at least 70%, at least 80%, at least 90%, or at least 95% homology thereto.

[0175] In one embodiment, the family 7 or family 7-like binding molecule comprises at least one immunoglobulin single domain antibody directed against IL-17R comprising a human V_{H} domain comprising at least one antigen binding site comprising CDR1, CDR2 and CDR3, said CDR1 comprises or consists of the amino acid sequence SEQ ID NO. 2577 or a sequence with at least 70%, at least 80%, at least 90%, or at least 95% homology thereto, said CDR2 comprises or consists of the amino acid sequence SEQ ID NO. 2578 or a sequence with at least 70%, at least 80%, at least 90%, or at least 95% homology thereto, and said CDR3 comprises or consists of the amino acid sequence SEQ ID NO. 2579, or a sequence with at least 70%, at least 80%, at least 90%, or at least 95% homology thereto.

[0176] In one embodiment, said CDR1 comprises or consists of the amino acid sequence SEQ ID NO. 2577 or a sequence with at least 70%, 80%, 81%, 82%, 83%, 84%, 85%, 86%, 87%, 88%, 89%, 90%, 91%, 92%, 93%, 94%, 95%, 96%, 97%, 98% or 99% homology thereto. In one embodiment, said CDR2 comprises or consists of the amino acid sequence SEQ ID NO. 2578 or a sequence with at least 70%, 80%, 81%, 82%, 83%, 84%, 85%, 86%, 87%, 88%, 89%, 90%, 91%, 92%, 93%, 94%, 95%, 96%, 97%, 98% or 99% homology thereto. In one embodiment, said CDR3 comprises or consists of the amino acid sequence SEQ ID NO. 2579 or a sequence with at least 70%, 80%, 81%, 82%, 83%, 84%, 85%, 86%, 87%, 88%, 89%, 90%, 91%, 92%, 93%, 94%, 95%, 96%, 97%, 98% or 99% homology thereto.

[0177] In one embodiment, the family 7 or family 7-like V_{H} has a V_{H} domain that comprises or consists of SEQ ID NO. 2580 or a sequence with at least 40%, 50%, 60%, 70%, 80%, 80%, 81%, 82%, 83%, 84%, 85%, 86%, 87%, 88%, 89%, 90%, 91%, 92%, 93%, 94%, 95%, 96%, 97%, 98% or 99% homology thereto.

[0178] In another embodiment, the V_{H} domain comprises SEQ ID NO. 2580, but comprises 1, 2, 3, 4, 5, 6, 7, 8, 9 or 10 amino acid substitutions. In one embodiment, these are in the framework region. In another embodiment, these are in the CDRs. In one embodiment, the amino acid substitutions are in the framework and CDR sequences.

[0179] The family 7 or family 7-like binding molecules have KD, Koff, KA, Kd and IC₅₀ values as further described herein and as shown in the examples.

[0180] In one aspect, the binding molecule according to the invention comprises a CDR3 sequence selected from a family 1 or family 1-like, family 2 or family 2-like, family 3 or family 3-like, family 4 or family 4-like, family 5 or family 5-like, family 6 or family 6-like or family 7 or family 7-like CDR3 sequence combined with a CDR1 and CDR2 sequence from another family listed herein.

[0181] For example, the binding molecule according to the invention comprises a family 1 or family 1-like CDR3 sequence combined with a CDR1 and/or a CDR2 sequence from one or two other families as shown in Table 2, 3, 4, 5, 6 or 7.

[0182] In another aspect, the binding molecule according to the invention comprises a family 2 or family 2-like CDR3 sequence combined with a CDR1 and/or a CDR2 sequence from one or two other families as shown in Table 1, 3, 4, 5, 6 or 7. Various combinations are possible as would be appreciated by a skilled person.

[0183] In another aspect, the binding molecule according to the invention comprises a family 3 or family 3-like CDR3 sequence combined with a CDR1 and/or a CDR2 sequence from one or two other families as shown in Table 1, 2, 4, 5, 6 or 7. Various combinations are possible as would be appreciated by a skilled person.

[0184] In another aspect, the binding molecule according to the invention comprises a family 4 or family 4-like CDR3 sequence combined with a CDR1 and/or a CDR2 sequence from one or two other families as shown in Table 1, 2, 3, 5, 6 or 7. Various combinations are possible as would be appreciated by a skilled person.

[0185] In another aspect, the binding molecule according to the invention comprises a family 5 or family 5-like CDR3 sequence combined with a CDR1 and/or a CDR2 sequence from one or two other families as shown in Table 1, 2, 3, 4, 6 or 7. Various combinations are possible as would be appreciated by a skilled person.

[0186] In another aspect, the binding molecule according to the invention comprises a family 6 or family 6-like CDR3 sequence combined with a CDR1 and/or a CDR2 sequence from one or two other families as shown in Table 1, 2, 3, 5 or 7. Various combinations are possible as would be appreciated by a skilled person.

[0187] In another aspect, the binding molecule according to the invention comprises a family 7 or family 7-like CDR3 sequence combined with a CDR1 and/or a CDR2 sequence from one or two other families as shown in Table 1, 2, 3, 5 or 6. Various combinations are possible as would be appreciated by a skilled person.

[0188] As mentioned above, also within the scope of the invention are V_{H} domains that comprise additional C or N terminal residues, for example linker residues introduced from the expression vector used (e.g., LEGGGS from phagemid vector or AA) and/or His tags, e.g. hexa-His (HHHHHH, SEQ ID NO: 2605).

[0189] A binding molecule described herein may be provided as a fusion protein with one or more additional protein moiety. For example, the binding molecule described herein may be provided as a fusion with a second moiety.

[0190] The second moiety may comprise a V_{H} domain that is also specific for human IL-17RA thus providing a bivalent binding molecule. In one embodiment, the binding molecule is biparatopic. Biparatopic binding molecules bind to different epitopes. Biparatopic binding molecules of the present invention can be constructed using methods known art.

[0191] For example, a family 1 binding molecule may be linked to a family 2, 3, 4, 5, 6 or 7 or family 2, 3, 4, 5, 6 or 7-like binding molecule.

[0192] In another embodiment, the second moiety comprises a V_{H} domain or another antibody fragment that is specific for a different antigen to provide a bispecific binding molecule. As used herein, the term “bispecific binding molecule” thus refers to a polypeptide that comprises a binding molecule as described herein which has a binding site that has binding specificity for IL17-RA, and a second polypeptide domain which has a binding site that has binding specificity for a second target, i.e., the agent has specificity for two targets. The first target and the second target are not the same, i.e. are different targets e.g., proteins, but are both present on a cell. Accordingly, a bispecific binding molecule as described herein can selectively and specifically bind to a cell that expresses (or displays on its cell surface) the first target and the second target. In another embodiment, the binding molecule comprises more than two moieties.

[0193] In another embodiment, more than two moieties are joined together providing a multispecific binding molecule. A multispecific polypeptide agent as described herein can in addition bind one or more additional targets, i.e., a multispecific polypeptide can bind at least two, at least three, at least four, at least five, at least six, or more targets, wherein the multispecific polypeptide agent has at least two, at least, at least three, at least four, at least five, at least six, or more target binding sites respectively.

[0194] As used herein, the term “target” refers to a biological molecule (e.g., peptide, polypeptide, protein, lipid, carbohydrate) to which a polypeptide domain which has a binding site can selectively bind. The target can be, for example, an intracellular target (e.g. an intracellular protein target) or a cell surface target (e.g., a membrane protein, a receptor protein). Preferably, a target is a cell surface target, such as a cell surface protein. Preferably, the first cell surface target and second cell surface target are both present on a cell.

[0195] Multispecific antibodies of the present invention can be constructed using methods known art.

[0196] In biparatopic or multispecific binding molecules, the moieties are joined by a linker, for example a polypeptide linker. Suitable linkers, for example comprising linker including GS residues such as (Gly₄Ser)ₙ, where n=from 1 to 10, e.g. 1, 2, 3, 4, 5, 6, 7, 8, 9 or 10 are known in the art.

[0197] If desired, bispecific or multispecific binding molecules can be linked to an antibody Fc region or a fragment thereof, comprising one or both of C_{H}2 and C_{H}3 domains, and optionally a hinge region. For example, vectors encoding bispecific or multispecific binding molecules linked as a single nucleotide sequence to an Fc region or a fragment thereof can be used to prepare such polypeptides.

[0198] Exemplary second antigen targets include leukocyte receptors, e.g., MHC, CD2, CD3, CD4, CD7, CD8, CD25, CD28, CD4, CD45, CD58, CD80, CD86 or their ligands; TNF, IL-1 IL-15, IL-23, IL-6 or CD20. This list is not limited to the agents mentioned.

[0199] In one embodiment, the second moiety may serve to prolong the half-life of the binding molecule. The second moiety or third may comprise a protein that binds a serum albumin, e.g., human serum albumin (HSA). The second moiety may comprise a V_{H} domain that binds serum albumin, e.g. human serum albumin (HSA). The second moiety may comprise a serum albumin, e.g. a human serum albumin (HSA) or a variant thereof such as C34S. Further provided is binding molecule as described herein comprising a V_{H} domain and an Fc domain or a fragment thereof, e.g., wherein the V_{H} domain is fused to an Fc domain or a fragment thereof. Further provided is a binding molecule that comprises a second variable domain that specifically binds a second antigen, where the second antigen is an antigen other than human IL-17R. The second antigen may be a cluster of differentiation (CD) molecule or a Major Histocompatibility Complex (MHC) Class II molecule.

[0200] The present invention further provides an isolated nucleic acid encoding a binding member of the present invention. Nucleic acid may include DNA and/or RNA. In one aspect, the present invention provides a nucleic acid that codes for a CDR, for example a CDR3, or set of CDRs, a V_{H} domain or binding molecule as defined above. In one aspect, the invention also relates to nucleic acid sequences encoding V_{H} domains of family 1, 2, 3, 4, 5, 6 or 7 as shown herein. Examples of such sequences encoding V_{H} sequences of specific clones are shown below.

1.1
SEQ ID NO. 2581
CAGGTGCAGCTGGTGGAGTCTGGGGGAGGCTTGGTACAGCCTGGCAG
GTCCCTGAGACTCTCCTGTGCAGCCTCTGGATTCACCTTTGATGATT
ATGCCATGCACTGGGTCCGGCAAGCTCCAGGGAAGGGCCTGGAGTGG
GTCTCAGGTATTAGTTGGAATAGTGGTAGGATGGACTATGCGGACTC
TGTGAAGGGCCGATTCACCATCTCCAGAGACAACGCCAAGAAGTCCC
TGTATCTGCAAATGAACAGTCTGAGAGCTGAGGACACGGCCATGTAT
TACTGTGCAAAAGAGAAGGGCCTAGGATTTTGTCGTGGTGGTAGCTG
TTCCTACTTTGACTATAGGGGCCAGGGAACCCTGGTCACCGTCTCCT
CA
1.2
SEQ ID NO. 2582
GAGGTGCAGCTGGTGGAGTCTGGGGGAGGCTTGGTACAGCCTGGCAG
GTCCCTGAGACTCTCCTGTGCAGCCTCTGGATTCACCTTTGATGATT
ATGCCATGCACTGGGTCCGACAAGCTCCAGGAAAGGGCCTGGAGTGG
GTCTCAGGTATTAGTTGGAATAGTGGTAGGATGGACTATGCGGACTC
TGTGAAGGGCCGATTCACCATCTCCAGAGACAACGCCAAGAACTCCC
TGTATCTGCAAATGAACAGTCTGAGAGCTGAGGACACGGCCTTATAT
TACTGTGCAAAGGAGAAGGGCCTAGGATATTGTCGTGGTGGTAGCTG
TTCCTACTTTGACTACAGGGGCCAGGGAACCCTGGTCACCGTCTCCT
CA
1.3
SEQ ID NO. 2583
CAGGTGCAGCTGGTGGAGTCTGGGGGAGGCTTGGTACAGCCTGGCAG
GTCCCTGAGACTCTCCTGTGCAGCCTCTGGATTCACCTTTGCTGATT
ATGCCTTGCACTGGGTCCGGCAAGCTCCAGGGAAGGGCCTGGAGTGG
GTCTCAGGTATTAGTTGGAATAGTGGTAGGAAGGACTATGCGGACAC
TGTGAAGGGCCGATTCACCATCTCCAGAGACAACGCCAAGAAGTCCC
TGTATCTGCAAATGAACAGTCTGAGAGCTGAGGACACGGCCATGTAT
TACTGTGCAAAAGAGAAGGGCCTAGGATTTTGTCGTGGTGGTAGCTG
TTCCTACTTTGACTATAGGGGCCAGGGAACCCTGGTCACCGTCTCCT
CA
1.4
SEQ ID NO. 2584
CAGGTGCAGCTGGTGGAGTCTGGGGGAGGCTTGGTACAGCCTGGCAG
GTCCCTGAGACTCTCCTGTGCAGCCTCTGGATTCACCTTTGCTGATT
ATGCCTTGCACTGGGTCCGGCAAGCTCCAGGGAAGGGCCTGGAGTGG
GTCTCAGGTATTAGTTGGAATGCCGGTAGGAAGGACTATGCGGACAC
TGTGAAGGGCCGATTCACCATCTCCAGAGACAACGCCAAGAAGTCCC
TGTATCTGCAAATGAACAGTCTGAGAGCTGAGGACACGGCCATGTAT
TACTGTGCAAAAGAGAAGGGCCTAGGATTTTGTCGTGGTGGTAGCTG
TTCCTACTTTGACTATAGGGGCCAGGGAACCCTGGTCACCGTCTCCT
CA
1.5
SEQ ID NO. 2585
GAGGTGCAGCTGGTGGAGTCTGGGGGAGGCTTGGTACAGCCTGGCAG
GTCCCTGAGACTCTCCTGTGCAGCCTCTGGATTCACCTTTGCTGATT
ATGCCTTGCACTGGGTCCGACAAGCTCCAGGAAAGGGCCTGGAGTGG
GTCTCAGGTATTAGTTGGAATAGTGGTAGGAAGGACTATGCGGACAC
TGTGAAGGGCCGATTCACCATCTCCAGAGACAACGCCAAGAACTCCC
TGTATCTGCAAATGAACAGTCTGAGAGCTGAGGACACGGCCTTATAT
TACTGTGCAAAGGAGAAGGGCCTAGGATATTGTCGTGGTGGTAGCTG
TTCCTACTTTGACTACAGGGGCCAGGGAACCCTGGTCACCGTCTCCT
CA
1.6
SEQ ID NO. 2586
GAAGTGCAGCTGGTTGAGAGCGGTGGTGGTCTGGTTCAGCCGGGTCG
CAGCCTGCGCCTGAGCTGCGCGGCTAGCGGCTTTACCTTCGCAGATT
ACGCCCTGCATTGGGTTCGTCAAGCACCGGGTAAAGGCCTGGAGTGG
GTGTCCGGCATCTCTTGGAACGCGGGTCGTAAGGATTATGCGGACAC
GGTCAAGGGTCGCTTCACCATTAGCCGTGACAATGCGAAAAATAGCC
TGTATTTGCAGATGAACAGCCTGCGTGCGGAAGATACCGCGCTGTAT
TACTGCGCGAAAGAAAAGGGCTTGGGCTATTGTCGTGGTGGCAGCTG
TTCGTACTTTGACTACCGTGGTCAGGGTACGCTGGTGACGGTCTCGA
GC
2.1
SEQ ID NO. 2587
CAGGTCCAGCTGGTGCAGTCTGGGGCTGAGGTGAAGAAGCCTGGGGC
CTCAGTGAAGGTCTCCTGCAAGGCTTCTGGATACCCCTTCACCAGTT
ATGATATCAATTGGGTGCGACAGGCCACAGGACAAAGCCTTGAGTGG
ATGGGATGGATGAACCCTAACAGTGGTGACACAGTCTATGCACAGAA
ATTCCAGGGCAGAGTCACCATGACCAGGAATACCTCCATAAGCACAG
CCTACATGGAGCTGAGCAGCCTGAGATCTGAGGACACGGCCGTGTAT
TTTTGTGCGAGAGGCAGAAGGGATGACTGGAAGAACAATTATTGGGG
CCAGGGAACCCTGGTCACTGTCTCCTCA
2.2
SEQ ID NO. 2588
CAGGTCCAGCTGGTGCAGTCTGGGGCTGAGGTGAAGAAGCCTGGGGC
CTCAGTGAAGGTCTCCTGCAAGGCTTCTGGATACCCCTTCACCAGTT
ATGATATCAATTGGGTGCGACAGGCCACAGGACGAAGCCTTGAGTGG
ATGGGATGGATGAACCCTACCAATGGTAACACAGTCTATGCACAGAA
ATTCCAGGACAGAGTCACCATGACCAGGAATACCTCCATAAGCACAG
CCTACATGGAGCTGAGCAGCCTGAGATCTGAGGACACGGCCGTGTAT
TTTTGTGCGAGAGGCAGAAGGGATGACTGGAAGAACAATTATTGGGG
CCAGGGAACCCTGGTCACTGTCTCCTCA
2.3
SEQ ID NO. 2589
CAGGTCCAGCTGGTGCAGTCTGGGGCTGAGGTGAAGAAGCCTGGGGC
CTCAGTGAAGGTCTCCTGCAAGGCTTCTGGATACCCCTTCACCAGTT
ATGATATCAATTGGGTGCGACAGGCCACAGGACGAAGCCTTGAGTGG
ATGGGATGGATGAACCCTACAAGTGGTGACACAGTCTATGCACAGAA
ATTCCAGGACAGAGTCACCATGACCAGGAATACCTCCATAAGCACAG
CCTACATGGAGCTGAGCAGCCTGAGATCTGAGGACACGGCCGTGTAT
TTTTGTGCGAGAGGCAGAAGGGATAACTGGAAGAACAATTATTGGGG
CCAGGGAACCCTGGTCACTGTCTCCTCA
3.1
SEQ ID NO. 2590
GAGGTGCAGCTGGTGGAGTCTGGGGGAGGCTTGGTCCAGCCTGGGGG
GTCCCTGAGACTCTCCTGTGCAGCCTCTGGATTTCCCTTTAGTACCT
ATTGGATGAGGTGGCTCCGCCAGGCTCCAGGGAAGGGCCTGGAGTGG
GTGGCCAACATAAACCAAGATGGAAGTGAGAAATACTATGTGGACTC
TGTGAAGGGCCGATTCACCATTTCCAGAGACAACGCCAAGAGTTCAC
TGTTTCTGCAAATGAACAGCCTGAGAGCCGAGGACACGGCTGTATAT
TACTGTGCGAGAGGGTGGGAGTCGGGGTGGTTCGAACCCTGGGGCCA
GGGAACCCTGGTCACCGTCTCCTCA
4.1
SEQ ID NO. 2591
CAGGTTCAGCTGGTGCAGTCTGGGGCTGAGGTGAAGAAGCCTGGGGC
CTCAGTGAAGGTCTCCTGCAAGGCTTCTGGATACCCCTTCACCAATT
ATGATATCAGCTGGATACGACAGGCCACTGGACAAAGTCTTGAGTGG
ATGGGATGGATGAACCCTGACAGTGGTAACACAGGCTATGCACAGAA
GTTCCAGGGCAGAGTCACCATGACCAGGAACACCTCCATAAGCACAG
CCTACATGGAACTGAGTGGCCTGAGATCTGAGGACACGGCCGTATAT
TTCTGTGCGAGAGGGGGTTACAATGCCTGGAGAACGGACTACTGGGG
CCAGGGCACCCTGGTCACCGTCTCCTCA
5.1
SEQ ID NO. 2592
GAGGTGCAGCTGGTGGAGTCTGGGGGAGGCTTGGTCAAGCCTGGAGG
GTCCCTGAGACTCTCCTGTGAAGCCTCTGGATTCACCTTCAGTGACT
TCGACATGAGCTGGATCCGCCAGGCTCCAGGGAAGGGGCTGGAGTGG
GTTGCATACATTAGTAGTAGTGATAGTACCATATATTATAGAGACTC
TGTGAAGGGCCGATTCACCATTTCCAGGGACAACGCCAAGAACTCAC
TGTATCTGCAAATGAACAGCCTGAGAGCCGAAGACACGGCCGTGTAT
TACTGTTCGAGAAACGGGGCCCGGTATAACTGGAACTACGGGGACTT
CCAGCACTGGGGCCAGGGCACCCTGGTCACTGTCTCCTCA
6.1
SEQ ID NO. 2593
GAGGTGCAGCTGGTGGAGTCTGGGGGAGGCTTGGTCAAGCCTGGAGG
GTCCCTGAGACTCTCCTGTGCAGCCTCTGGATTCACCTTCAGTGACG
ACTACATGAGCTGGCTCCGCCAGGCTCCAGGGAAGGGGCTGGAGTGG
GTTTCATACATTAGTAGTAGTGGTAGTACCATATACTACGCAGACTC
TGTGAAGGGCCGATTCACCATCTCCAGGGACAACGCCAAGAACTCAC
TGTATCTGCAAATGAACAGCCTGAGAGCCGAGGACTCGGCCGTGTAT
TACTGTGCGAGAAAAGATATAACGAATATAGCAGTGGGCTCCCTCGG
CTACTGGGGCCAGGGAACCCTGGTCACCGTCTCCTCA
7.1
SEQ ID NO. 2594
GAGGTGCAGCTGGTGGAGTCTGGGGGAGGCTTGGTCCAGCCTGGGGG
GTCCCTGAGACTCTCCTGTGCAGCCTCAGGATTCACCTTTAGTAACT
ATTGGATGAGCTGGGTCCGCCAGGCTCGAGGGAAGGGGCTGGAGTGG
GTGGCCAACATAAGACCAGATGGAAGTGAGCGATACTATGTGGACTC
TGTGAAGGGCCGATTCACCATCTCCAGAGACAACGCCAAGAACTCAT
TGTATCTGCAGATGAGCAGCCTGAGAGCCGAGGACACGGCTGTGTAT
TACTGTGCGAGATCGAGAGATTGGGGATCTCGGGCTTTTGATATCTG
GGGCCAAGGGACAATGGTCACCGTCTCCTCA

[0201] Nucleic acid according to the present invention may comprise DNA or RNA and may be wholly or partially synthetic or recombinantly produced. Reference to a nucleotide sequence as set out herein encompasses a DNA molecule with the specified sequence, and encompasses a RNA molecule with the specified sequence in which U is substituted for T, unless context requires otherwise.

[0202] Furthermore, the invention relates to a nucleic acid construct comprising at least one nucleic acid defined above. The construct may be in the form of plasmids, vectors, transcription or expression cassettes.

[0203] The invention also relates to an isolated recombinant host cell comprising one or more nucleic acid constructs as above.

[0204] The invention also relates to a binding agent capable of binding to IL-17RA that competes for binding to IL-17RA with a binding molecule of the invention as described above in a competitive assay.

[0205] The invention also relates to an isolated V_{H} domain comprising an amino acid product of or derived from a human V_{H} germline sequence, for example a human V_{H} 3-09, V_{H}1 -08, V_{H} 3-07 or V_{H} 3-11 germline sequence.

[0206] The binding molecules of the invention have certain functional properties as described below and set out in the examples.

[0207] In particular, the binding molecules of the invention block the effects of IL-17RA on its target cells and are thus indicated for use in the treatment of IL-17RA-mediated diseases and disorders, for example as described herein.

[0208] These and other pharmacological activities of the binding molecules of the invention may be demonstrated in standard test methods for example as described in the art, e.g., “Neutralization of IL-17R dependent production of interleukin-6 by primary human fibroblasts: The production of IL-6 in primary human (dermal) fibroblasts is dependent on IL-17” (Hwang S Y et al., (2004) Arthritis Res Ther; 6:R120-128)) and in the examples herein. Thus, as described in more detail in the examples, binding members according to the invention neutralize IL-17RA with high potency. The term “neutralizing” thus refers to neutralization of a biological activity of IL-17R when a binding protein specifically binds IL-17R. Inhibition of a biological activity of IL-17R by a neutralizing binding protein can be assessed by measuring one or more indicators of IL-17R biological activity well known in the art as described in the examples.

[0209] For example, neutralisation of IL-17R binding to its receptor may be measured as cellular release of a biological molecule, e.g., MMP13, PGE2 or a cytokine such as IL-6 or IL-8, in a biological assay, since IL-17RA binding to its receptor induces cellular release of these molecules, which can be determined using appropriate assays, e.g. in HT1080 cells, chondrocytes or other suitable cell or tissue types.

[0210] Inhibition of biological activity may be partial or total. In specific embodiments, binding members are provided that inhibit IL-17R biological activity by at least 95%, at least 90%, at least 85%, at least 80%, at least 75%, at least 70%, at least 60%, or at least 50% of the activity in absence of the binding member. The degree to which a binding member neutralises IL-17RA is referred to as its neutralising potency. Potency may be determined or measured using one or more assays known to the skilled person and/or as described or referred to herein. For example, potency may be assayed in:
[0211] HTRF(R) (Homogeneous Time-Resolved Fluorescence) receptor-ligand binding assay
   [0212] HT1080 IL-6 release assay—HT1080 cell assay using synergised IL-6 release in response to IL-17 and TNFα
   [0213] Chondrocyte IL-6/IL-8/MMP13/PGE2-release assay IL-6 release assay in cartilage explants
   [0214] IL-6 release assay in synovial fibroblasts (e.g. from RA or OA patients), e.g. using synergised IL-6 response to IL-17 and TNFα.

[0215] Assays methods are described in detail in the examples.

[0216] Neutralising potency of a binding member as calculated in an assay using IL-17 from a first species (e.g. human) may be compared with neutralising potency of the binding member in the same assay using IL-17RA from a second species (e.g., cynomolgus), in order to assess the extent of cross-reactivity of the binding member for IL-17RA of the two species.

[0217] Potency is normally expressed as an IC₅₀ value, in nM unless otherwise stated. In functional assays, IC₅₀ is the concentration of a binding member that reduces a biological response by 50% of its maximum. IC₅₀ may be calculated by plotting % of maximal biological response as a function of the log of the binding member concentration, and using a software program to fit a sigmoidal function to the data to generate IC₅₀ values.

[0218] In another aspect, the invention thus relates to a binding molecule comprising at least one V_{H} domain directed against human IL-17A, or comprising or consisting of at least one immunoglobulin single V_{H} domain antibody directed against IL-17RA, preferably human IL-17RA, wherein said domain is a human V_{H} domain and has an IC₅₀ for inhibition of IL-6 production of about 0.2 to about 500 nM or more, for example 0.2 to 400, 0.2 to 300, 0.2 to 200, 0.2 to 100, 0.2 to 50, 0.2 to 40, 0.2 to 30, 0.2 to 20, 0.2 to 10, 0.2 to 9, 0.2 to 8, 0.2 to 7, 0.2 to 6, 0.2 to 5, 0.2 to 4.0, 0.2 to, 0.2 to 2 or 0.2 to 1 when tested as described in the examples, i.e. by measuring the ability of IL-17RA binding V_{H} to inhibit IL-17RA induced IL-6 release from the cell line HT1080. The binding molecules of the invention may have an IC₅₀ for inhibition of IL-6 production of less than about 500 nM, preferably less than about 100 nM assessed by measuring the ability of IL-17RA binding V_{H} to inhibit IL-17RA induced IL-6 release from the cell line HT1080. This assay measures IL-6 release, a detailed method is given in the examples. The binding molecule, for example a V_{H} domain, having these binding characteristics may be selected from one of the sequences disclosed herein. In another embodiment, the V_{H} domain comprises a CDR3 sequence or V_{H} sequence as described herein.

[0219] In one embodiment, said IL-17RA binding molecule comprises a family 1 or family 1-like V_{H} sequence or part thereof, for example a CDR3 sequence, as described above. In one embodiment, said IL-17RA binding molecule comprises a family 2 or family 2-like V_{H} sequence or part thereof, for example a CDR3 sequence, as described above. In one embodiment, said IL-17RA binding molecule comprises a family 3 or family 3-like V_{H} sequence or part thereof, for example a CDR3 sequence, as described above. In one embodiment, said IL-17RA binding molecule comprises a family 4 or family 4-like V_{H} sequence or part thereof, for example a CDR3 sequence, as described above. In one embodiment, said IL-17RA binding molecule comprises a family 5 or family 5-like V_{H} sequence or part thereof, for example a CDR3 sequence, as described above. In one embodiment, said IL-17RA binding molecule comprises a family 6 or family 6-like V_{H} sequence or part thereof, for example a CDR3 sequence, as described above. In one embodiment, said IL-17RA binding molecule comprises a family 7 or family 7-like V_{H} sequence or part thereof, for example a CDR3 sequence, as described above. Various embodiments of these sequences are detailed above.

[0220] Additionally, binding kinetics and affinity (expressed as the equilibrium dissociation constant, KD) of IL-17RA binding molecules of the invention for binding IL-17RA may be determined, e.g. using surface plasmon resonance such as BIAcore®, or KD may be estimated from pA2 analysis.

[0221] In another aspect, the invention relates to a binding molecule that has a KD (M) value of in the range of from about 1E-07 (1×10⁻⁷) to about 6E-11 (6×10⁻¹¹), wherein said KD is calculated using BIAcore®. The term “KD” refers to the “equilibrium dissociation constant” and refers to the value obtained in a titration measurement at equilibrium, or by dividing the dissociation rate constant (Koff) by the association rate constant (Kon). In one embodiment, the KD may be as shown in the examples.

[0222] In one embodiment, said IL-17RA binding molecule comprises a family 1 or family 1-like V_{H} sequence or part thereof, for example a CDR3 sequence, as described above. In one embodiment, said IL-17RA binding molecule comprises a family 21 or family 2-like V_{H} sequence or part thereof, for example a CDR3 sequence, as described above. In one embodiment, said IL-17RA binding molecule comprises a family 3 or family 3-like V_{H} sequence or part thereof, for example a CDR3 sequence, as described above. In one embodiment, said IL-17RA binding molecule comprises a family 4 or family 4-like V_{H} sequence or part thereof, for example a CDR3 sequence, as described above. In one embodiment, said IL-17RA binding molecule comprises a family 5 or family 5-like V_{H} sequence or part thereof, for example a CDR3 sequence, as described above. In one embodiment, said IL-17RA binding molecule comprises a family 6 or family 6-like V_{H} sequence or part thereof, for example a CDR3 sequence, as described above. In one embodiment, said IL-17RA binding molecule comprises a family 7 or family 7-like V_{H} sequence or part thereof, for example a CDR3 sequence, as described above. Various embodiments of these sequences are detailed above.

[0223] In one embodiment, the binding molecule has a KD as defined above and an IC₅₀ for inhibition of IL-6 production as defined above.

[0224] A skilled person will know that there are different ways to identify and obtain the antigen binding molecules as described herein, including in vitro and in vivo expression libraries. This is further described in the examples. Optimisation techniques known in the art, such as display techniques (e.g., ribosome display and/or phage display) and/or mutagenesis techniques (e.g., error prone mutagenesis) can be used.

[0225] Methods for preparing or generating the polypeptides, nucleic acids, host cells, products and compositions described herein using in vitro expression libraries can comprise the steps of:
[0226] a) providing a set, collection or library of nucleic acid sequences encoding amino acid sequences; and
[0227] b) screening said set, collection or library of amino acid sequences for amino acid sequences that can bind to/have affinity for IL-17RA and
[0228] c) isolating the amino acid sequence(s) that can bind to/have affinity for IL-17RA.

[0229] In the above methods, the set, collection or library of sequences may be displayed on a phage, phagemid, ribosome or suitable micro-organism (such as yeast), such as to facilitate screening. Suitable methods, techniques and host organisms for displaying and screening (a set, collection or library of) sequences will be clear to the person skilled in the art (see for example Phage Display of Peptides and Proteins: A Laboratory Manual, Academic Press; 1st edition (Oct. 28, 1996) Brian K. Kay, Jill Winter, John McCafferty).

[0230] The binding molecules described herein comprising V_{H} domains, can be expressed in a transgenic rodent. The transgenic rodent, for example a mouse, has a reduced capacity to express endogenous antibody genes. Thus, in one embodiment, the rodent has a reduced capacity to express endogenous light and/or heavy chain antibody genes. The rodent may therefore comprise additional modifications to disrupt expression of endogenous light and/or heavy chain antibody genes so that no functional light and/or heavy chains are produced.

[0231] In one embodiment, the rodent is a mouse. The mouse may comprise a non-functional lambda light chain locus. Thus, the mouse does not make a functional endogenous lambda light chain. In one embodiment, the lambda light chain locus is deleted in part or completely or rendered non-functional through insertion, inversion, a recombination event, gene editing or gene silencing. For example, at least the constant region genes C1, C2 and C3 may be deleted or rendered non-functional through insertion. In one embodiment, the locus is functionally silenced so that mouse does not make a functional endogenous lambda light chain.

[0232] Furthermore, the mouse may comprise a non-functional kappa light chain locus. Thus, the mouse does not make a functional endogenous kappa light chain. In one embodiment, the kappa light chain locus is deleted in part or completely or rendered non-functional through insertion, inversion, a recombination event, gene editing or gene silencing. In one embodiment, the locus is functionally silenced so that the mouse does not make a functional endogenous kappa light chain.

[0233] The mouse having functionally silenced endogenous lambda and kappa L-chain loci may, for example, be made as disclosed in WO 2003/000737, which is hereby incorporated by reference in its entirety.

[0234] Furthermore, the mouse may comprise a non-functional heavy chain locus. Thus, the mouse does not make a functional endogenous heavy chain. In one embodiment, the heavy chain locus is deleted in part or completely or rendered non-functional through insertion, inversion, a recombination event, gene editing or gene silencing. In one embodiment, the locus is functionally silenced so that the mouse does not make a functional endogenous heavy chain. In one embodiment, the locus is functionally silenced so that mouse does not make a functional endogenous heavy chain.

[0235] For example, as described in WO 2004/076618 (hereby incorporated by reference in its entirety), all 8 endogenous heavy chain constant region immunoglobulin genes (μ, δ, γ3, γ1, γ2a, γ2b, ε and α) are absent in the mouse, or partially absent to the extent that they are non-functional, or genes δ, γ3, γ1, γ2a, γ2b and ε are absent and the flanking genes μ and a are partially absent to the extent that they are rendered non-functional, or genes μ, δ, γ3, γ1, γ2a, γ2b and ε are absent and a is partially absent to the extent that it is rendered non-functional, or δ, γ3, γ1, γ2a, γ2b, ε and α are absent and μ is partially absent to the extent that it is rendered non-functional. By deletion in part is meant that the endogenous locus gene sequence has been deleted or disrupted, for example by an insertion, to the extent that no functional endogenous gene product is encoded by the locus, i.e. that no functional product is expressed from the locus. In another embodiment, the locus is functionally silenced.

[0236] In one embodiment, the mouse comprises a non-functional endogenous heavy chain locus, a non-functional endogenous lambda light chain locus and a non-functional endogenous kappa light chain locus. The mouse therefore does not produce any functional endogenous light or heavy chains. Thus, the mouse is a triple knockout (TKO) mouse.

[0237] The transgenic mouse may comprise a vector, for example a Yeast Artificial Chromosome (YAC) for expressing a heterologous heavy chain locus. YACs are vectors that can be employed for the cloning of very large DNA inserts in yeast. As well as comprising all three cis-acting structural elements essential for behaving like natural yeast chromosomes (an autonomously replicating sequence (ARS), a centromere (CEN) and two telomeres (TEL)), their capacity to accept large DNA inserts enables them to reach the minimum size (150 kb) required for chromosome-like stability and for fidelity of transmission in yeast cells. The construction and use of YACs is well known in the art (e.g. Bruschi, C. V. and Gjuracic, K. Yeast Artificial Chromosomes, ENCYCLOPEDIA OF LIFE SCIENCES 2002 Macmillan Publishers Ltd, Nature Publishing Group/www.els.net).

[0238] For example, the YAC may comprise a plethora of human V_{H}, D and J genes in combination with mouse immunoglobulin constant region genes lacking C_{H}1 domains, mouse enhancer and regulatory regions. An example of such a YAC is provided in the example section.

[0239] Alternative methods known in the art may be used for deletion or inactivation of endogenous mouse or rat immunoglobulin genes and introduction of human V_{H}, D and J genes in combination with mouse immunoglobulin constant region genes lacking C_{H}1 domains, mouse enhancer and regulatory regions

[0240] Transgenic mice can be created according to standard techniques as illustrated in the examples. The two most characterised routes for creating transgenic mice are via pronuclear microinjection of genetic material into freshly fertilised oocytes or via the introduction of stably transfected embryonic stem cells into morula or blastocyst stage embryos. Regardless of how the genetic material is introduced, the manipulated embryos are transferred to pseudo-pregnant female recipients where pregnancy continues and candidate transgenic pups are born.

[0241] The main differences between these broad methods are that ES clones can be screened extensively before their use to create a transgenic animal. In contrast, pronuclear microinjection relies on the genetic material integrating to the host genome after its introduction and, generally speaking, the successful incorporation of the transgene cannot be confirmed until after pups are born.

[0242] There are many methods known in the art to both assist with and determine whether successful integration of transgenes occurs. Transgenic animals can be generated by multiple means including random integration of the construct into the genome, site-specific integration, or homologous recombination. There are various tools and techniques that can be used to both drive and select for transgene integration and subsequent modification including the use of drug resistance markers (positive selection), recombinases, recombination-mediated cassette exchange, negative selection techniques, and nucleases to improve the efficiency of recombination. Most of these methods are commonly used in the modification of ES cells. However, some of the techniques may have utility for enhancing transgenesis mediated via pronuclear injection.

[0243] Further refinements can be used to give more efficient generation of the transgenic line within the desired background. As described above, in preferred embodiments, the endogenous mouse immunoglobulin expression is silenced to permit sole use of the introduced transgene for the expression of the heavy-chain only repertoire that can be exploited for drug discovery. Genetically-manipulated mice, for example TKO mice that are silenced for all endogenous immunoglobulin loci (mouse heavy chain, mouse kappa chain and mouse lambda chain) can be used as described above. The transfer of any introduced transgene to this TKO background can be achieved via breeding, (either conventional or with the inclusion of an IVF step to give efficient scaling of the process). However, it is also possible to include the TKO background during the transgenesis procedure. For example, for microinjection, the oocytes may be derived from TKO donors. Similarly, ES cells from TKO embryos can be derived for use in transgenesis.

[0244] The invention also relates to a method for producing a binding molecule comprising at least one immunoglobulin single domain antibody directed against IL-17RA wherein said domain is a human V_{H} domain said method comprising
[0245] a) immunising a transgenic mouse that expresses a nucleic acid construct comprising human heavy chain V genes and that is not capable of making functional endogenous light or heavy chains with an IL-17RA antigen,
[0246] b) generating a library from said mouse and
[0247] c) isolating V_{H} domains from said libraries.

[0248] Additional steps to optimize the sequences can be included.

[0249] The invention also relates to a binding molecule capable of binding human IL-17RA comprising a V_{H} domain obtained or obtainable from a mouse that is not capable of making functional endogenous light or heavy chains, for example through the method described above.

[0250] The binding molecule of the invention may be conjugated to another moiety. This can be selected from a toxin, enzyme, radioisotope, other detectable label, peptide, protein and chemical moiety of interest.

[0251] For example, the binding molecule of the invention may be labelled with a detectable or functional label. A label can be any molecule that produces or can be induced to produce a signal, including but not limited to fluorescers, radiolabels, enzymes, chemiluminescers or photosensitizers. Thus, binding may be detected and/or measured by detecting fluorescence or luminescence, radioactivity, enzyme activity or light absorbance.

[0252] Half-life of the binding molecule of the invention can be increased by a chemical modification, especially by PEGylation, or by incorporation in a liposome or linking to another molecule, e.g. serum albumin or an anti-HSA binding molecule.

[0253] In one embodiment, a binding molecule of the invention is covalently modified. The term “covalently modified/covalent modification” includes modifications of a binding molecule according to the present invention, e.g. of a specified sequence; with an organic proteinaceous or non-proteinaceous derivatizing agent, fusions to heterologous polypeptide sequences, and post-translational modifications. Covalent modified polypeptides, e.g., of a specified sequence, still have the functional properties described herein, for example the ability to bind the human IL-17 or e.g. neutralize IL-6 production of IL-17 induced human dermal fibroblasts by crosslinking. Covalent modifications are generally introduced by reacting targeted amino acid residues with an organic derivatizing agent that is capable of reacting with selected sides or terminal residues, or by harnessing mechanisms of post-translational modifications that function in selected recombinant host cells. Certain post-translational modifications are the result of the action of recombinant host cells on the expressed polypeptide. Glutaminyl and asparaginyl residues are frequently post-translationally deamidated to the corresponding glutamyl and aspartyl residues. Alternatively, these residues are deaminated under mildly acidic conditions. Other post-translational modifications include hydroxylation of proline and lysine, phosphorylation of hydroxyl groups of seryl, tyrosine or threonyl residues, methylation of the [alpha]-amino groups of lysine, arginine, and histidine side chains. Covalent modifications e.g. include fusion proteins comprising a binding molecule according to the present invention, e.g. of a specified sequence and their amino acid sequence variants, such as immunoadhesins, and N-terminal fusions to heterologous signal sequences.

[0254] In another aspect of the present invention, there is provided a pharmaceutical composition comprising an IL-17RA binding molecule according to the present invention and a pharmaceutically acceptable carrier. The binding molecule of the present invention or a composition thereof can be administered by any convenient route and examples of the administration form of the binding molecule or composition of the present invention include without limitation topical, in particular dermal, parenteral, and intranasal. Parenteral administration includes subcutaneous injections, intravenous, intramuscular, intrasternal injection or infusion techniques. Compositions can take the form of one or more dosage units.

[0255] The composition of the invention can be in the form of a liquid, e. g. a solution, emulsion or suspension. The liquid can be useful for delivery by dermal, topical or injection routes. The liquid compositions of the invention, whether they are solutions, suspensions or other like form, can also include one or more of the following: sterile diluents such as water, saline solution, preferably physiological saline, Ringer's solution, isotonic sodium chloride, fixed oils such as synthetic mono or digylcerides, polyethylene glycols, glycerin, or other solvents; antibacterial agents such as benzyl alcohol or methyl paraben; and agents for the adjustment of tonicity such as sodium chloride or dextrose. A composition can be enclosed in an ampoule, a disposable syringe or a multiple-dose vial made of glass, plastic or other material.

[0256] In specific embodiments, it can be desirable to administer a binding molecule of the present invention or composition thereof locally to the area in need of treatment.

[0257] Thus, in a preferred embodiment of all aspects of the invention, administration of the composition or binding molecule of the invention is by topical administration to healthy or diseased skin. The binding molecule is capable of penetrating at least the outer layer of the skin and can therefore be delivered dermally or transdermally. Accordingly, in one embodiment of the various aspects of the invention, topical delivery of the the composition or binding molecule of the invention to the skin is direct delivery into the skin for local non-systemic exposure. In another embodiment, topical delivery of the composition or binding molecule of the invention to the skin is direct delivery to the skin to provide systemic exposure as the _{H} domain penetrates through all layers of the skin.

[0258] The skin that is treated may be diseased or healthy skin. In a preferred embodiment, the skin disease is psoriasis or atopic dermatitis.

[0259] Preferably, the surface area to which it is applied is 1%-30% of the body surface area, for example 1%-10% or 1-20%. Administration may thus be to 1%, 2%, 3%, 4%, 5%, 6%, 7%, 8%, 9%, 10%, 11%, 12%, 13%, 14%, 15%, 16%, 17%, 18%, 19%, 20%, 21%, 22%, 23%, 24%, 25%, 26%, 27%, 28%, 29% or 30% of body surface area. In one embodiment, the disease state is mild. In another embodiment, the disease state is moderate. In another embodiment, the disease state is severe. For the treatment of psoriasis, administration is to areas affected, typically one or more affected area selected from elbows, knees, palms of hands, scalp, soles of feet, genitals, upper thighs, groin, buttocks, face and torso. For the treatment of atopic dermatitis administration is to areas affected, typically one or more affected area selected from face, forearms and wrists.

[0260] Thus, the binding molecule can be applied directly to diseased or healthy skin in the form of cream, lotion, sprays, solution, gel, ointment, paste, plaster, patch, bioadhesive, suspension or the like, and/or may be prepared so as to contain liposomes, micelles, and/or microspheres. In one embodiment, the binding molecule is applied directly to diseased skin in the form of a liquid (e.g. a spray), plaster, patch or bioadhesive. In one embodiment, the binding molecule is applied directly to diseased skin in the form of a microemulsion.

[0261] Microemulsions are generally defined as having a droplet diameter within the range of 2-500 nm thus allowing effective delivery of actives into the skin. Microemulsions have been proposed for use in enhancing transdermal delivery of a range of compounds. This is described in US2007/0243132 incorporated herein in its entirety.

[0262] Specifically, as used herein, the term microemulsion refers to a formulation that comprises an oil phase, a water phase and a surfactant, wherein the microemulsion is suitable for transdermal delivery of a binding molecule, for example comprising a human V_{H} domain as described herein. Preferably, the microemulsion of the invention has a droplet diameter within the range of 2-500 nm. In one embodiment, a microemulsion may further comprise a co-surfactant, a co-solvent, or a combination thereof.

[0263] The microemulsion of the present invention may be oil-in-water microemulsion, wherein the surfactant is preferentially soluble in water; water-in-oil microemulsion, wherein the surfactant is mainly in the oil phase; a three-phase microemulsion wherein a surfactant-rich middle phase coexists with water and oil phases; a bicontinuous monophase; a single phase micellar solution that forms upon addition of a sufficient quantity of amphiphile (surfactant plus alcohol); or a swollen micellar solution.

[0264] The microemulsion of the present invention may be produced by methods known in the art. In general, microemulsions are produced by emulsifying components under conditions including typically sufficient force or the required temperature to generate the required dispersion level, conductivity, viscosity, percolativity or other dispersion characteristics.

[0265] Microemulsion formation can be assessed using scattering and spectroscopic techniques such as neutron scattering, time-average scattering, quasi-electric light scattering i.e., high-resolution ultrasonic spectroscopy or photon correlation spectroscopy. The partition coefficients of microemulsions may also be measured chromatographically. The selection of particular formulations is based on a number of different paradigms depending upon the desired application. Illustrative paradigms include the hydrophilic-lipophilic balance, the phase-inversion temperature, or the cohesive-energy ratio. Microemulsions may be formulated using a wide range of immiscible liquids and other additional agents.

[0266] A microemulsion of the present invention may comprise an oil phase in the range of from 50 and 99% by weight, most preferably from 50 and 90% by weight; a water phase in the range of from 2 to 50% by weight, most preferably between 1 and 50% by weight; and surfactant in the range of from 0.1 to 90% by weight, preferably in the range of from 1 to 90% by weight surfactant. The microemulsion may further comprise from 0.1 to 90% by weight cosurfactant or cosolvent; preferably from 1 to 90% by weight cosurfactant or cosolvent.

[0267] The oil phase may comprise natural oils derived from plants or animals, such as vegetable oils, sunflower oils, coconut oils, almond oils; purified synthetic or natural di or triglycerides (such as Crodamol GTC® and Capmul MC®); phospholipids and their derivatives (such as lecithin or lysolecithin); fatty acid esters (such as isopropyl myristate, isopropyl palmitate, ethyl oleate, oleic acid ethyl ester); hydrocarbons (such as hexane, the n-decane through n-octadecane series); and/or glycerolysed fats and oils (such as glyceryl monooleate, glyceryl monocaprylate, glycerol monocaprate, propylene glycol monocaprylate, propyleme glycol monolaurate).

[0268] Other oil phase ingredients include, but are not limited to, Labrafil M 1944 CS™, benzene, tetrahydrofuran, and n-methyl pyrrolidone, or halogenated hydrocarbons, such as methylene chloride, or chloroform. In a particular embodiment, the oil phase comprises Crodamol GTCC® and Capmul MCM®, at 3:1 ratio. The oil component is either used alone or in combination with another oil component or components. Each oil or unique mixture of oils may require a different surfactant or mixture of surfactants or surfactants and co-surfactants to form a microemulsion with the water phase, as can routinely be determined by those of skill in the art. Water phase ingredients may comprise water and any water-soluble components in water, including one or more pharmaceutical agent.

[0269] The microemulsion of the present invention may further comprise solvents or other agents to enhance emulsion formation or stability. Other agents may be introduced to provide functions such as pH, ionic content, polymerisation, taste, smell, sterility, colour, viscosity, etc.

[0270] The microemulsions of the present invention may also be generated using any suitable synthetic plastic or polymeric, monomeric or hybrid colloidal material.

[0271] According to the methods and uses set out above, the binding molecule can be administered together with one or more chemical skin penetration enhancer. Examples of skin penetration enhancers are set out below.

[0272] In another embodiment, the binding molecule is administered using occlusion. In one embodiment, the binding molecule is administered to healthy or diseased skin together with a chemical skin penetration enhancer and using occlusion. In one embodiment, the binding molecule is administered to healthy or diseased skin as a microemulsion and using occlusion.

[0273] In another embodiment of the various aspects of the invention, administration may be improved using non-chemical skin penetration enhancers, for example phonophoresis, sonophoresis, electroporation or using the microneedle technique. This uses small needles (10-200 μm height and 10-50 μm width) which are connected with the drug reservoir. The microneedle delivery device is applied to the skin surface without reaching the nerve endings of the upper dermis.

[0274] The binding molecule administered as set out above is capable of penetrating at least the outer layer of the skin and thus delivers an effective therapeutic amount of the binding molecule to treat the disease. The binding molecule administered as set out herein penetrates the skin in preferably 6 hours or less, for example 1 hour or less.

[0275] In one aspect, the invention relates to a pharmaceutical composition comprising a binding molecule of the invention and a skin penetration enhancer that facilitates or improves skin penetration. Unless otherwise specified, the term skin penetration enhancer as used herein refers to a chemical skin penetration enhancer. Numerous chemical penetration enhancers are known in the art and can be used in the composition of the invention. These include, but are not limited to: water, alcohols, preferably alcohols with up to six carbon atoms, for example ethanol, glycols, for example alcohol diethylene glycol (Transcutol®), alkyl-N,N-disubstituted aminoacetates, for example dodecyl-N,N-dimethyl-aminoacetate, esters, for example ethylacetate, Azone® and derivatives, surfactants, for example sodium dodecyl sulphate, terpenes and terpenoids, for example d-Limonene, fatty acids, for example oleic acid, urea and derivatives, for example 1,3-Diphenyl-urea, pyrrolidones, for example N-Methyl-2-pyrrolidone, and 2-pyrrolidone-5-carboxylic acid, cyclodextrins, for example beta-cyclodextrin, sulphoxides, for example dimethylsulphoxide. Other skin penetration enhancers are known to the skilled person. In one embodiment, the enhancer is not water. In one embodiment, the skin penetration enhancers are selected from one or more of Propylene Glycol, Isopropyl Myristate and Azone. Preferred penetration enhancers are DMSO, azone, Transcuto®, isopropyl myristate, oleic acid or combinations thereof, for example as set out in table 6 and in the examples.

[0276] In one embodiment, the penetration enhancer is not one or more of water, ethanol, polyethylene glycol derivatives, polyoxyethylene derivatives such as polysorbate, a fatty alcohol such as cetyl alcohol, stearyl alcohol, or cerostearyl alcohol, glycerol and propylene glycol.

[0277] The amount of the binding molecule of the present invention that is effective/active in the treatment of a particular disease will depend on the nature of the disease, and can be determined by standard clinical techniques. In addition, in vitro or in vivo assays can optionally be employed to help identify optimal dosage ranges. The precise dose to be employed in the compositions will also depend on the route of administration, and the seriousness of the disease, and should be decided according to the judgment of the practitioner and each patient's circumstances.

[0278] Compositions of the invention comprise an effective amount of a binding molecule of the present invention such that a prophylactically- or therapeutically-effective dosage will be obtained. The correct dosage of the compounds will vary according to the particular formulation, the mode of application, and its particular site, and the disease being treated. Other factors like age, body weight, sex, diet, time of administration, rate of excretion, drug combinations, reaction sensitivities and severity of the disease shall be taken into account. Administration can be carried out continuously or periodically within the maximum tolerated dose.

[0279] Typically, this amount is at least about 0.01% of a binding molecule of the present invention by weight of the composition.

[0280] Preferred compositions of the present invention are prepared so that a parenteral dosage unit contains from about 0.01% to about 2% by weight of the binding molecule of the present invention.

[0281] For intravenous administration, the composition can comprise from about typically about 0.1 mg/kg to about 250 mg/kg of the animal's body weight, preferably, between about 0.1 mg/kg and about 20 mg/kg of the animal's body weight, and more preferably about 1 mg/kg to about 10 mg/kg of the animal's body weight.

[0282] The present compositions can take the form of suitable carriers, such aerosols, sprays, suspensions, or any other form suitable for use. Other examples of suitable pharmaceutical carriers are described in “Remington's Pharmaceutical Sciences” by E. W. Martin.

[0283] Liposomes and micelles can also be used according to the invention.

[0284] Liposomes are microscopic vesicles having a lipid wall comprising a lipid bilayer, and, in the present context, encapsulate heavy chain only antibody or composition of the invention. Liposomal preparations herein include cationic (positively charged), anionic (negatively charged), and neutral preparations. Cationic liposomes are readily available. For example, N[1-2,3-dioleyloxy)propyl]-N,N,N-triethyl-ammonium (DOTMA) liposomes are available under the tradename Lipofectin® (GIBCO BRL, Grand Island, N.Y.). Similarly, anionic and neutral liposomes are readily available as well or can be easily prepared using readily available materials. Such materials include phosphatidyl choline, cholesterol, phosphatidyl ethanolamine, dioleoylphosphatidyl choline (DOPC), dioleoylphosphatidyl glycerol (DOPG), and dioleoylphoshatidyl ethanolamine (DOPE), among others. These materials can also be mixed with DOTMA in appropriate ratios. Methods for making liposomes using these materials are well known in the art.

[0285] Micelles are known in the art as comprised of surfactant molecules arranged so that their polar headgroups form an outer spherical shell, while the hydrophobic, hydrocarbon chains are oriented towards the center of the sphere, forming a core. Micelles form in an aqueous solution containing surfactant at a high enough concentration so that micelles naturally result. Surfactants useful for forming micelles include, but are not limited to, potassium laurate, sodium octane sulfonate, sodium decane sulfonate, sodium dodecane sulfonate, sodium lauryl sulfate, docusate sodium, decyltrimethylammonium bromide, dodecyltrimethylammonium bromide, tetradecyltrimethylammonium bromide, tetradecyltrimethyl-ammonium chloride, dodecylammonium chloride, polyoxyl-8 dodecyl ether, polyoxyl-12 dodecyl ether, nonoxynol 10, and nonoxynol 30.

[0286] Microspheres, similarly, may be incorporated into the present formulations. Like liposomes and micelles, microspheres essentially encapsulate one or more components of the present formulations. They are generally although not necessarily formed from lipids, preferably charged lipids such as phospholipids. Preparation of lipidic microspheres is well known in the art and described in the pertinent texts and literature.

[0287] The pharmaceutical compositions can be prepared using methodology well known in the pharmaceutical art. For example, a composition can be prepared by combining a binding molecule of the present invention with water so as to form a solution. A surfactant can be added to facilitate the formation of a homogeneous solution or suspension.

[0288] The invention furthermore relates to a method for the prevention and/or treatment of a disease, said method comprising administering, to a subject in need thereof, a pharmaceutically active amount of a binding molecule of the invention, and/or of a pharmaceutical composition of the invention. More in particular, the invention relates to a method for the prevention and/or treatment of a disease selected from the non-limiting group consisting of the diseases listed herein, said method comprising administering, to a subject in need thereof, a pharmaceutically active amount of a binding molecule of the invention, and/or of a pharmaceutical composition of the invention. Examples of the immune related diseases that can be treated according to the invention will be clear to the skilled person based on the disclosure herein, and for example include autoimmune diseases, inflammatory conditions, allergies and allergic conditions, hypersensitivity reactions, severe infections, and organ or tissue transplant rejection.

[0289] The invention also relates to a binding molecule or pharmaceutical composition of the invention for use in the treatment of disease. In another aspect, the invention relates to a binding molecule of the invention for use in the treatment of a disease, for example autoimmune diseases, inflammatory conditions, allergies and allergic conditions, hypersensitivity reactions, severe infections, and organ or tissue transplant rejection.

[0290] In another aspect, the invention relates to the use of a binding molecule of the invention in the manufacture of a medicament for the treatment of a disease, for example autoimmune diseases, inflammatory conditions, allergies and allergic conditions, hypersensitivity reactions, severe infections, and organ or tissue transplant rejection.

[0291] The disease according to the aspects set out above may be selected from the following non-limiting list: psoriasis, systemic lupus erythematosis, rheumatoid arthritis, osteoarthritis, juvenile chronic arthritis, spondyloarthropathies, systemic sclerosis, idiopathic inflammatory myopathies, Sjogren's syndrome, systemic vasculitis, sarcoidosis, autoimmune hemolytic anemia, autoimmune thrombocytopenia, thyroiditis, diabetes mellitus, immune-mediated renal disease, demyelinating diseases of the central and peripheral nervous systems such as multiple sclerosis, idiopathic demyelinating polyneuropathy or Guillain Barre syndrome, and chronic inflammatory demyelinating polyneuropathy, hepatobiliary diseases such as infectious, autoimmune chronic active hepatitis, primary biliary cirrhosis, granulomatous hepatitis, and sclerosing cholangitis, inflammatory bowel disease, gluten-sensitive enteropathy, and Whipple's disease, autoimmune or immune-mediated skin diseases including bullous skin diseases, erythema multiforme and contact dermatitis, allergic diseases such as asthma, allergic rhinitis, atopic dermatitis, food hypersensitivity and urticaria, immunologic diseases of the lung such as eosinophilic pneumonia, idiopathic pulmonary fibrosis and hypersensitivity pneumonitis, autoimmune haematological disorders (including e.g. hemolytic anaemia, aplastic anaemia, pure red cell anaemia and idiopathic thrombocytopenia), autoimmune inflammatory bowel disease (including e.g. ulcerative colitis, Crohn's disease and Irritable Bowel Syndrome), transplantation associated diseases including graft rejection and graft-versus-host-disease.

[0292] In a preferred embodiment, the disease is selected from psoriasis, spondyloarthropathies, uveitis and atopic dermatitis. In another embodiment, the disease is asthma.

[0293] Binding molecules of the invention are also useful for the treatment, prevention, or amelioration of asthma, bronchitis, pneumoconiosis, pulmonary emphysema, and other obstructive or inflammatory diseases of the airways. Binding molecules of the invention are useful for treating undesirable acute and hyperacute inflammatory reactions which are mediated by IL-17RA, or involve IL-17RA production, or the promotion of TNF release by IL-17RA, e.g. acute infections, for example septic shock (e.g., endotoxic shock and adult respiratory distress syndrome), meningitis, pneumonia; and severe burns; and for the treatment of cachexia or wasting syndrome associated with morbid TNF release, consequent to infection, cancer, or organ dysfunction, especially AIDS-related cachexia, e.g., associated with or consequential to HTV infection.

[0294] Binding molecules of the invention are particularly useful for treating diseases of bone metabolism including osteoarthritis, osteoporosis and other inflammatory arthritis, and bone loss in general, including age-related bone loss, and in particular periodontal disease.

[0295] Binding molecules of the invention may be administered as the sole active ingredient or in combination with one or more other drug, e.g., immunosuppressive or immunomodulating agents or other anti-inflammatory agents, e.g., for the treatment or prevention of diseases mentioned above. For example, the binding molecule of the invention maybe used in combination with immunosuppressive monoclonal antibodies, e.g., monoclonal antibodies to leukocyte receptors, e.g., MHC, CD2, CD3, CD4, CD7, CD8, CD25, CD28, CD40. CD45, CD58, CD80, CD86 or their ligands; other immunomodulatory compounds, e.g. a recombinant binding molecule having at least a portion of the extracellular domain of CTLA4 or a mutant thereof, e.g., an at least extracellular portion of CTLA4 or a mutant thereof joined to a non-CTLA4 protein sequence, e.g. CTLA4Ig (e.g., designated ATCC 68629) or a mutant thereof, e.g., LEA29Y; adhesion molecule inhibitors, e.g., LFA-I antagonists, ICAM-I or -3 antagonists, VCAM-4 antagonists or VLA-4 antagonists; or a chemotherapeutic agent, e.g., paclitaxel, gemcitabine, cisplatinum, doxorubicin or 5-fluorouracil; anti-TNF agents, e.g., monoclonal antibodies to TNF, e.g., infliximab, adalimumab, CDP870, or receptor constructs to TNF-RI or TNF-RII, e.g., Etanercept™, PEG-TNF-RI; blockers of proinflammatory cytokines, IL-I blockers, e.g., Anakinra™ or IL-1 trap, AAL160, ACZ 885, IL-6 blockers; chemokines blockers, e.g., inhibitors or activators of proteases, e.g. metalloproteases, anti-IL-15 antibodies, anti-IL-6 antibodies, anti-CD20 antibodies, NSAIDs, such as aspirin or an anti-infectious agent. This list is not limited to the agents mentioned.

[0296] The binding molecule of pharmaceutical composition of the invention may administered at the same time or at a different time as the other drug. Administration may be simultaneously, sequentially or separately.

[0297] The invention also relates to methods for diagnosing a disease. Exemplary diseases are listed above. In one embodiment, the disease is psoriasis. The method comprises determining the level of IL-17RA expression by detecting binding of a binding molecule described herein in a sample and comparing the level of expression of IL-17RA in the test sample with the level of expression in a control sample from a non-psoriatic subject or with a standard value or standard value range for a non-psoriatic subject. An elevation in IL-17RA expression in the test sample relative to the control or standard indicates presence of the disease.

[0298] In another aspect, the invention provides a kit comprising a binding molecule of the invention useful for the treatment of a disease described above and optionally instructions for use.

[0299] The invention also relates to detection methods using the binding molecule of the invention. Given their ability to bind to human IL-17RA, the human-IL-17RA-binding molecules disclosed herein can be used to detect IL-17RA (e.g., in a biological sample, such as serum or plasma), using a conventional immunoassay, such as an enzyme linked immunosorbent assays (ELISA), a radioimmunoassay (RIA) or tissue immunohistochemistry. A method for detecting IL-17RA in a biological sample is provided comprising contacting a biological sample with a binding molecule disclosed herein and detecting either the binding molecule bound to IL-17RA or unbound binding molecule, to thereby detect IL-17RA in the biological sample. The binding molecule can be directly or indirectly labeled with a detectable substance to facilitate detection of the bound or unbound molecule. Suitable detectable substances include various enzymes, prosthetic groups, fluorescent materials, luminescent materials and radioactive materials.

[0300] Alternative to labeling the binding molecule, human IL-17RA can be assayed in biological fluids by a competition immunoassay utilizing IL-17RA standards labeled with a detectable substance and an unlabeled human IL-17RA binding molecule. In this assay, the biological sample, the labeled IL-17RA standards and the human IL-17RA binding molecule are combined and the amount of labeled IL-17RA standard bound to the unlabeled binding molecule is determined. The amount of human IL-17RA in the biological sample is inversely proportional to the amount of labeled IL-17RA standard bound to the IL-17RA binding molecule. Similarly, human IL-17RA can also be assayed in biological fluids by a competition immunoassay utilizing IL-17RA standards labeled with a detectable substance and an unlabeled human IL-17RA binding molecule.

[0301] As explained herein, binding molecules of the invention are capable of neutralizing IL-17RA activity, e.g., human IL-17RA activity, both in vitro and in vivo.

[0302] Accordingly, such binding molecules disclosed herein can be used to inhibit IL-17RA activity, e.g., in a cell culture containing IL-17RA, in human subjects or in other mammalian subjects having IL-17RA with which a binding molecule disclosed herein cross-reacts. In one embodiment, a method for inhibiting or increasing IL-17RA activity is provided comprising contacting IL-17RA with a binding molecule disclosed herein such that IL-17RA activity is inhibited or increased. For example, in a sample containing, or suspected of containing IL-17RA, a binding molecule disclosed herein can be added to the culture medium to inhibit IL-17RA activity in the sample.

[0303] Unless otherwise defined herein, scientific and technical terms used in connection with the present disclosure shall have the meanings that are commonly understood by those of ordinary skill in the art. While the foregoing disclosure provides a general description of the subject matter encompassed within the scope of the present invention, including methods, as well as the best mode thereof, of making and using this invention, the following examples are provided to further enable those skilled in the art to practice this invention and to provide a complete written description thereof. However, those skilled in the art will appreciate that the specifics of these examples should not be read as limiting on the invention, the scope of which should be apprehended from the claims and equivalents thereof appended to this disclosure. Various further aspects and embodiments of the present invention will be apparent to those skilled in the art in view of the present disclosure.

[0304] All documents mentioned in this specification are incorporated herein by reference in their entirety, including references to gene accession numbers.

[0305] “and/or” where used herein is to be taken as specific disclosure of each of the two specified features or components with or without the other. For example “A and/or B” is to be taken as specific disclosure of each of (i) A, (ii) B and (iii) A and B, just as if each is set out individually herein. Unless context dictates otherwise, the descriptions and definitions of the features set out above are not limited to any particular aspect or embodiment of the invention and apply equally to all aspects and embodiments which are described.

[0306] The invention is further described in the non-limiting examples.

### EXAMPLES

### Example 1. Construction of Tg/TKO Mice

[0307] Mice carrying a heavy-chain antibody transgenic locus in germline configuration within a background that is silenced for endogenous heavy and light chain antibody expression (triple knock-out, or TKO) were created as previously described (WO2004/076618 and WO2003/000737, Ren et al. Genomics, 84, 686, 2004; Zou et al., J. Immunol., 170, 1354, 2003). Briefly, transgenic mice were derived following pronuclear microinjection of freshly fertilised oocytes with a yeast artificial chromosome (YAC) comprising a plethora of human V_{H}, D and J genes in combination with mouse immunoglobulin constant region genes lacking C_{H}1 domains, mouse enhancer and regulatory regions. Yeast artificial chromosomes (YACs) are vectors that can be employed for the cloning of very large DNA inserts in yeast. As well as comprising all three cis-acting structural elements essential for behaving like natural yeast chromosomes (an autonomously replicating sequence (ARS), a centromere (CEN) and two telomeres (TEL)), their capacity to accept large DNA inserts enables them to reach the minimum size (150 kb) required for chromosome-like stability and for fidelity of transmission in yeast cells. The construction and use of YACs is well known in the art (e.g., Bruschi, C. V. and Gjuracic, K. Yeast Artificial Chromosomes, ENCYCLOPEDIA OF LIFE SCIENCES 2002 Macmillan Publishers Ltd, Nature Publishing Group/www.els.net).

[0308] The YAC used was about 340 kb comprises 10 human heavy chain V genes in their natural configuration, human heavy chain D and J genes, a murine Cγ1 gene and a murine 3′ enhancer gene. It lacks the C_{H}1 exon. Specifically, the YAC comprised (from 5′ to 3′): telomere-yeast TRP1 marker gene-Centromere-10 human V genes-human D genes-human J genes-mouse p enhancer and switch-mouse Cγ1 (C_{H}1Δ) gene-mouse 3′ enhancer-Hygromycin resistant gene-yeast marker gene HIS3-telomere.

[0309] The transgenic founder mice were back-crossed with animals that lacked endogenous immunoglobulin expression to create the Tg/TKO lines used in the immunisation studies described.

### Example 2. Antigen for Immunisation

[0310] The immunisations used recombinant purified protein. Recombinant human IL-17RA was purchased from R&D systems (177-IR-100).

### Example 3. Immunisation Protocol

[0311] In the present case, recombinant protein was administered to the Tg/TKO. Briefly, mice aged 8-12 weeks of age each received a total of 10 ug of recombinant protein, emulsified in Complete Freund's Adjuvant and delivered subcutaneously, followed by boosts of 1-10 ug of recombinant protein, emulsified in Incomplete Freund's Adjuvant, also administered subcutaneously, given at various intervals following the initial priming. A final dose of antigen was administered intraperitoneally, in phosphate buffered saline, in the absence of adjuvant.

[0312] Alternative immunisation routes and procedures can also be employed. For example, different adjuvants or immune potentiating procedures may be used instead of Freund's adjuvant. DNA immunisations are often delivered intramuscularly or via a Genegun. Transfected cells or membrane preparations from such cells are often, although not exclusively, administered intraperitoneally.

### Example 4. Serum ELISA

[0313] During and following immunisation, serum was collected from mice and checked for the presence of heavy-chain antibody responses to the immunogen by ELISA. Nunc Maxisorp plates (Nunc Cat. No. 443404) were coated overnight at 4° C. with 50 ul/well of a 5 ug recombinant antigen/ml of PBS solution. Following decanting of the antigen solution, plates were washed using PBS (prepared from PBS tablets, Oxoid cat no. BR0014G) supplemented with 0.05% Tween™20 (sigma P1379), followed by washes with PBS without added Tween™. To block non-specific protein interactions, a solution of 3% skimmed milk powder (Marvel) in PBS was added to the wells and the plate was incubated for at least one hour at room temperature. Dilutions of serum in 3% Marvel/PBS were prepared in polypropylene tubes or plates and incubated for at least one hour at room temperature prior to transfer to the blocked ELISA plate where a further incubation of at least one hour took place. Unbound protein was then washed away using repetitive washes with PBS/Tween® followed by PBS. A solution of biotin-conjugated, goat anti mouse IgG, Fcgamma subclass 1 specific antibody (Jackson 115-065-205), prepared in PBS/3% Marvel was then added to each well and a further incubation at room temperature for at least one hour took place. Unbound detection antibody was removed by repeated washing using PBS/Tween® and PBS. Neutravidin-HRP solution (Pierce 31030) in 3% Marvel/PBS was then added to the ELISA plates and allowed to bind for at least 30 minutes. Following further washing, the ELISA was developed using TMB substrate (Sigma cat. no. T0440) and the reaction was stopped after 10 minutes by the addition of 0.5M H₂SO₄ solution (Sigma cat. no. 320501). Absorbances were determined by reading at 450 nm. Examples of Serum ELISA data are shown in FIG. 8. Alternative assays, such as ELISPOT assays, may also be used to check for immunisation induced heavy-chain antibody responses.

### Example 5. Generation of Libraries from Immunised Mice

[0314] a. Processing Tissues, RNA Extraction and cDNA Manufacture

[0315] Spleen, inguinal and brachial lymph nodes were collected into RNAlater® from each immunised animal. For each animal, ⅓ of the spleen and 4 lymph nodes were processed separately. Initially, the tissues were homogenised; following transfer of tissues to Lysing matrix D bead tubes (MP Bio cat#116913100), 600 ul of RLT buffer containing β-mercaptoethanol (from Qiagen RNeasy® kit cat#74104) was added before homogenisation in a MP Bio Fastprep homogeniser (cat #116004500) using 6 m/s 40 seconds cycles. The tubes containing the homogenised tissues were transferred to ice and debris was pelleted by microcentrifugation at 10 g for 5 minutes. 400 ul of the supernatant was removed and used for RT-PCR.

[0316] Initially, RNA was extracted using Qiagen RNeasy® kit cat#74104 following the manufacturer's protocol. Each RNA sample was then used to make cDNA using Superscript III RT-PCR high-fidelity kit (Invitrogen cat #12574-035). For each spleen and LN RNA sample, 5 RT-PCR reactions were performed, each with VH_J/F (long) primer in combination with a primer for V_{H}1, V_{H}2, V_{H}3, V_{H}4 or V_{H}6 family. Details of the primers are below in Table 8.

TABLE 8
Primers

| | |
|---|---|
| V1a/pelB | GCCGCTGGATTGTTATTACTCGCGGCCCAGCCGG |
| (long) | CCATGGCCCAGGTBCAGCTGGTGCAGTCTGGGGC |
| | TGAGG SEQ ID NO 2595 |
| V2/pelB | GCCGCTGGATTGTTATTACTCGCGGCCCAGCCGG |
| (long) | CCATGGCCCAGATCACCTTGAAGGAGTCTGG |
| | SEQ ID NO 2596 |
| V3/pelB | GCCGCTGGATTGTTATTACTCGCGGCCCAGCCGG |
| (long) | CCATGGCCSAGGTGCAGCTGGTGGAGTCTGGGGG |
| | AGG SEQ ID NO 2597 |
| V4- | GCCGCTGGATTGTTATTACTCGCGGCCCAGCCGG |
| 4/pelB | CCATGGCCCAGGTGCAGCTGCAGGAGTCGGG |
| (long) | SEQ ID NO 2598 |
| V6/pelB | GCCGCTGGATTGTTATTACTCGCGGCCCAGCCGG |
| (long) | CCATGGCCCAGGTACAGCTGCAGCAGTCAGG |
| | SEQ ID NO 2599 |
| VH_J/F | CCGTGGTGATGGTGGTGATGGCTACCGCCACCCT |
| (long) | CGAGTGARGAGACRGTGACC |
| | SEQ ID NO 2600 |

Residues in bold have homology with pUCG3

[0317] Mastermixes were prepared for the RT-PCR reactions, based on the following tube reaction components.

12.5 μl 2x reaction mix
0.5 μl forward primer (10 uM)
0.5 μl reverse primer (10 uM)
0.5 μl enzyme mix
500 ng-1 μg RNA
Up to 25 μl with water

[0318] The RT-PCR reactions were carried out in a thermal cycler using the following conditions;

| | |
|---|---|
| 50° C. 20 min | |
| 94° C. 2 min | |
| 35 cycles of | 94° C. 15 sec |
| | 58° C. 30 sec |
| | 68° C. 30 sec |
| 68° C. 5 min | |
| Hold at 4° C. | |

[0319] Products in the range of 370 bp were confirmed by gel electrophoresis.

[0320] For each mouse, the V_{H} products amplified for a given family from the ⅓ spleen and each of the 4 lymph nodes were then pooled for purification using Thermo/Fermentas GeneJet PCR purification kit (cat #K0702) which was used according to the Manufacturer's instructions, with the products eluted in 50 ul of water.

[0321] b. Cloning into Phagemid Vector

[0322] The phagemid vector, pUCG3, was employed in these studies. As indicated, V_{H} may be cloned into pUCG3, using conventional methods involving restriction enzyme digestions with NcoI and XhoI, ligation and transformation. Alternatively, a PCR-based method may be used to construct the V_{H} phagemid libraries. Both of these procedures were used to generate libraries from the amplified V_{H} sequences. The former method is widely used in the art. For the PCR-based method, the following procedure was used:

[0323] A linearised version of pUCG3 was created using PCR; with the following primers:

pUCG3-F3
SEQ ID NO. 2601
CTCGAGGGTGGCGGTAGCCATCACCACCATC
pUCG3-R3
SEQ ID NO. 2602
TCCATGGCCATCGCCGGCTGGGCCGCGAG

[0324] Phusion High fidelity PCR master mix with GC buffer (cat # F532L, NEB) was used for the PCR reactions which comprised the following reagents;

| Phusion GC 2x mix | 25 | ul |
|---|---|---|
| pUCG3 | 5-10 | ng |
| Primers (10 uM) | 1.25 μl of each | |
| DMSO | 1.5 | μl |

| | |
|---|---|
| Nuclease-free H₂O | to final volume of 50 ul |

[0325] The cycling conditions used were

| | |
|---|---|
| | 98° C. 30 seconds |
| 10 cycles of | 98° C. 10 seconds |
| | 58° C. 20 seconds |
| | 68° C. 2 minutes, 30 seconds |
| 20 cycles of | 98° C. 10 seconds |
| | 58° C. 20 seconds |
| | 68° C. 3 minutes |
| | 68° C. 5 minutes |
| | 4° C. hold |

[0326] The PCR product (3152 bp) was gel purified using Fermentas GeneJet Gel purification kit (cat # K0691), according to the manufacturer's instructions, with final elution in 40 ul of elution buffer.

[0327] The purified V_{H} RT-PCR products were employed as megaprimers with the linearised pUCG3 to give phagemid products for transformation and library creation, based on the following reactions;

| | | |
|---|---|---|
| Phusion GC 2x mix | 25 | μl |
| Linearised pUCG3 | 700 | ng |
| V_{H} PCR product | 250 | ng |
| DMSO | 1.5 | μl |

| | |
|---|---|
| Nuclease-free H₂O | to 50 μl final volume |

PCR was performed as follows;

| | | |
|---|---|---|
| 98° C. 30 sec | | |
| 98° C. 10 sec | | |
| 58° C. 20 sec | {close oversize brace} | 10 cycles |
| 72° C. 2 min | | |
| 72° C. 5 min | | |
| Hold at 10° C. | | |

[0328] The products of PCR were analysed on a 1% agarose gel.

[0329] The various family V_{H}/phagemid products were purified using Ferment as PCR purification kit (cat #K0702) according to the manufacturer's instructions with the final elution being in 25 ul H₂O and used for transformations of TG1 E. coli (Lucigen, Cat: 60502-2) by electroporation using BioRad® 10×1 mm cuvettes (BioRad® cat #165-2089, a Eppendorf™ Eporator and pre-warmed recovery medium (Lucigen, proprietary mix). 2 ul of the purified products were added to 25 ul of cells for the electroporation, with up to 10 electroporations being performed for each V_{H}/phagemid product at 1800v. Electroporated cells were pooled and recovered in 50 ml Falcon tubes incubated for 1 hour at 37° C. with shaking at 150 rpm. A 10-fold dilution series of an aliquot of the transformations was performed and plated in petri dishes containing 2×TY agar supplemented with 2% (w/v) glucose and 100 ug/ml ampicillin. Resulting colonies on these dishes were used to estimate the library size. The remainder of the transformation was plated on large format Bioassay dishes containing 2×TY agar supplemented with 2% (w/v) glucose and 100 ug/ml ampicillin. All agar plates were incubated overnight at 30° C. 10 ml of 2×TY broth was added to the large format bioassay dishes and colonies were scraped and OD600 measured (OD of 1.0=5×10⁸ cells/ml). Aliquots were stored at −80° C. in cryovials after addition of 50% v/v glycerol solution (50%) or used directly in a phage selection process.

[0330] In some instances, clones were picked directly and sequence was determined to give an estimate of the diversity of the library. Typically, for each mouse a phage display library with greater than 1e8 recombinants was constructed to fully capture the V_{H} diversity in that mouse.

### Example 6. Selection Strategies for Isolation of IL-17RA-Binding V_{H}

[0331] Preparation of library phage stocks and phage display selections were performed according to published methods (Antibody Engineering, Edited by Benny Lo, chapter 8, p 161-176, 2004). In most cases, phage display combined with a panning approach was used to isolate binding V_{H} domains. However, a variety of different selection methods may be employed, including (a) soluble selections; (b) selections performed under stress, where phage are heated at 70° C. for 2 hours prior to selection; and (c) competitive selections, where excess antigen or antigen-reactive V_{H} domains are added as competition to encourage the recovery of high affinity V_{H} domains or to skew selections away from a particular epitope.

[0332] The IL-17RA antigen was expressed as a fusion with the Fc domain of human IgG1. Therefore, to minimise the isolation of unwanted antibodies to the Fc region of the fusion protein, human IgG1 was added to the phage display selections at 100 ug/ml (approx 650 nM) to compete or deselect for Fc binding V_{H}. For panning, antigen was immobilised onto maxisorb plates (Nunc 443404) in 50 ul volumes at 0.1-10 ug/ml in PBS. For the libraries from immunised mice, one round of selection was carried out.

### Example 7. Assays for Target Binding

[0333] V_{H} from the different selections were screened in one or more of the following assays to identify specific V_{H} with neutralising properties.

[0334] a) Binding ELISA

[0335] Following selections of the libraries, specific V_{H} antibodies were identified by phage ELISA following published methods (Antibody Engineering, Edited by Benny Lo, chapter 8, p 161-176, 2004). Phage ELISAs were performed against target protein and an unrelated antigen as control. In some cases, purified or crude extracts of V_{H} domains were assayed by ELISA instead of using a phage ELISA. In these cases, bacterial periplasmic extracts or purified V_{H} were used.

[0336] Small-scale bacterial periplasmic extracts were prepared from 1 ml cultures, grown in deep well plates. Starter cultures were used to inoculate 96-well deep well plates (Fisher, cat# MPA-600-030X) containing 2×TY broth (Melford, M2130), supplemented with 0.1% (w/v) glucose+100 ug/ml ampicillin at 37° C. with 250 rpm shaking. When OD600 had achieved 0.6-1, V_{H} production was induced by adding 100 ul of 2×TY, supplemented with IPTG (final concentration 1 mM) and ampicillin and the cultures were grown overnight at 30° C. with shaking at 250 rpm. E. coli were pelleted by centrifugation at 3200 rpm for 10 mins and supernatants discarded. Cell pellets were resuspended in 30-100 ul of ice cold extraction buffer (20% (w/v) sucrose, 1 mM EDTA & 50 mM Tris-HCl pH8.0) by gently pipetting. Cells were incubated on ice for 30 minutes and then centrifuged at 4500 rpm for 15 mins at 4° C. Supernatants were transferred to polypropylene plates and used, following incubation in Marvel/PBS blocking solution, in the ELISA.

[0337] The purified V_{H} were obtained by using the V_{H} C-terminal 6×HIS tag for nickel-agarose affinity chromatographic purification of the periplasmic extracts. A starter culture of each V_{H} was grown overnight in 5 ml 2×TY broth (Melford, M2103) supplemented with 2% (w/v) glucose+100 ug/ml ampicillin at 30° C. with 250 rpm shaking. 50 ul of this overnight culture was then used to inoculate 50 ml 2×TY supplemented with 2% (w/v) glucose+100 ug/ml ampicillin and incubated at 37° C. with 250 rpm shaking for approximately 6-8 hours (until OD600=0.6-1.0). Cultures were then centrifuged at 3200 rpm for 10 mins and the cell pellets resuspended in 50 ml fresh 2×TY broth containing 100 ug/ml ampicillin+1 mM IPTG. Shake flasks were then incubated overnight at 30° C. and 250 rpm. Cultures were again centrifuged at 3200 rpm for 10 mins and supernatants discarded. Cell pellets were resuspended in 1 ml ice cold extraction buffer (20% (w/v) sucrose, 1 mM EDTA & 50 mM Tris-HCl pH8.0) by gently pipetting and then a further 1.5 ml of 1:5 diluted ice cold extraction buffer added. Cells were incubated on ice for 30 minutes and then centrifuged at 4500 rpm for 15 mins at 4° C. Supernatants were transferred to 50 ml Falcon tubes containing imidazole (Sigma, 12399—final concentration 10 mM) and 0.5 ml of nickel agarose beads (Qiagen, Ni-NTA 50% soln, 30210) pre-equilibrated with PBS buffer. V_{H} binding to the nickel agarose beads was allowed to proceed for 2 hours at 4° C. with gentle shaking. The nickel agarose beads were then transferred to a polyprep column (BioRad™, 731-1550) and the supernatant discarded by gravity flow. The columns were then washed 3 times with 5 ml of PBS+0.05% Tween™ followed by 3 washes with 5 ml of PBS containing imidazole at a concentration of 20 mM. V_{H} were then eluted from the columns by the addition of 250 ul of PBS containing imidazole at a concentration of 250 mM. Imidazole was then removed from the purified V_{H} preparations by buffer exchange with NAP-5 columns (GE Healthcare, 17-0853-01) and then eluting with 1 ml of PBS. Yields of purified V_{H} were estimated spectrophotemetrically and purity was assessed using SDS PAGE.

[0338] The binding ELISA for crude or purified V_{H} was similar to the serum ELISA and phage ELISA, previously described, mostly differing in the final detection steps. Briefly, antigen was immobilised on maxisorb plates (Nunc 443404) by adding 50 ul volumes at 0.1-1 ug/ml in PBS and incubating at 4° C. overnight. Following coating, the antigen solution was aspirated and the plates were washed using PBS (prepared from PBS tablets, Oxoid cat no. BR0014G) supplemented with 0.05% Tween® 20 (sigma P1379), followed by washes with PBS without added Tween®. To block non-specific protein interactions, a solution of 3% skimmed milk powder (Marvel) in PBS was added to the wells and the plate was incubated for at least one hour at room temperature. Dilutions of periplasmic extract or purified V_{H} in 3% Marvel/PBS were prepared in polypropylene tubes or plates and incubated for at least one hour at room temperature prior to transfer to the blocked ELISA plate where a further incubation of at least one hour took place. Unbound protein was then washed away using repetitive washes with PBS/Tween® followed by PBS. A solution of HRP-conjugated anti-His Ab (Miltenyi Biotec, 130-092-785), prepared at 1:1000 dilution in PBS/3% Marvel was then added to each well and a further incubation at room temperature for at least one hour took place. Unbound detection antibody was removed by repeated washing using PBS/Tween® and PBS. The ELISA was then developed using TMB substrate (Sigma cat. no. T0440) and the reaction was stopped after 10 minutes by the addition of 0.5M H₂SO₄ solution (Sigma cat. no. 320501). Absorbances were determined by reading at 450 nm. Example ELISA data is shown in FIG. 14.

[0339] b) R/L Biochemical Inhibition Assay

[0340] V_{H}, both purified and crude periplasmic extracts, were also tested for their ability to inhibit the interaction of IL-17A with recombinant IL-17RA-Fc. Maxisorb 96F well mictrotitre plates were incubated with 50 ul solution of 2 nM IL-17-RA (R & D systems, cat #177-IR-100) and incubated overnight at 4° C. Following washing of excess coating antigen, as described above, the wells of the plate were incubated with 3% Marvel/PBS to block non-specific protein interactions. V_{H} preparations, crude periplasmic extracts or purified V_{H}, or suitable controls, were prepared with 1 nM recombinant IL-17A (Peprotech, cat# AF-200-17) in 3% skimmed milk powder/PBS solution in polypropylene plates or tubes. The mixture was then transferred to the assay plate and incubated for 1 hour at room temperature. Excess protein was removed by washing and bound IL-17A was detected by incubation with biotinylated anti-IL-17A Mab (R & D Systems, cat BAF317) followed by the addition of neutravidin-HRP (Pierce, cat#31030) and TMB substrate (Sigma, cat# T0440). The TMB reaction was stopped by addition of 0.5M H₂SO₄ and absorbances were measured at 450 nm in a plate reader.

[0341] Where appropriate, curve fitting in PRISM was used to determine the EC₅₀ of inhibiting V_{H}. Example data illustrating inhibition of IL-17A responses in the biochemical assay are shown in FIG. 10. V_{H} were expressed from phagemid vector and have the following C terminal extension LEGGGS HHHHHH (SEQ ID NO.2606).

[0342] c) R/L Cell Based Inhibition Assay

[0343] An assay was developed to measure the ability of IL-17RA-binding V_{H} to inhibit IL-17A-induced IL6 release from the cell line, HT1080 (ECACC cat #85111505). The cell line was maintained in exponential growth in MEM with Earles's salts, supplemented with non-essential amino acids, 10% FBS, 2 mM L-Glutamine and penicillin/streptomycin and incubated in a humidified incubator at 37° C., 5% CO₂. For the assay, 50,000 cells/well were seeded into a 96 flat bottomed tissue culture plate and cultured overnight. Serial dilution of purified V_{H} were prepared and incubated at 37° C. for 1 hour with culture medium/PBS supplemented with 10 ng/ml IL-17A (Peprotech cat# AF200-17). Following incubation, the V_{H}/IL-17A mixture (or suitable controls) were transferred to the HT1080 cells (from which culture medium had been aspirated) and incubated for a further 5 hours in the CO₂ incubator. The cell culture supernatant was collected and assayed for IL6 using the IL-6 Duoset (R & D Systems, cat# DY206), following manufacturer's instructions. Example data illustrating inhibition of IL-17A responses in the cell based assay are shown in FIG. 11. V_{H} were expressed from phagemid vector and have the following C terminal extension LEGGGS HHHHHH.

[0344] d) Biacore®.

[0345] Binding kinetics of anti-IL-17RA V_{H} antibodies were measured on a BIAcore® T200 instrument. For IL-17RA, first a protein G chip was prepared by diluting protein G to 20 ug/ml in acetate buffer, pH 4 (BIAcore®, cat# BR-100-49) and then coupled 1200 RU to a CM5 Series S chip using amine coupling chemistry. This surface was then used to capture IL-17RA Fc fusion protein from solution: IL-17RA at 10 ug/ml in HBS injected for 10 seconds at 30 ul/min flow rate would capture approximately 100-150 RU of IL-17RA onto the protein G surface.

[0346] Binding kinetics of anti-IL-17RA V_{H} antibodies were determined by single-cycle kinetics. V_{H} antibodies were prepared in dilution series (typically 1:3 dilution series starting with 100 nM V_{H} at the highest concentration), and then injected over the antigen coated surfaces and also a blank surface, starting with the lowest concentration of V_{H} and then working progressively up to the highest concentration. V_{H} binding kinetics were then determined from the (blank subtracted) sensorgram traces using 1:1 binding models and BIAevaluation software. Example BIAcore® binding traces are shown in FIG. 12.

[0347] Following the above screening cascade, a number of V_{H} to IL-17R were identified that demonstrated inhibitory properties. These are summarised below in table 9. The clones are the parent clones for optimisation.

TABLE 9

| | | | | | Cell | |
|---|---|---|---|---|---|---|
| | | | | Biochem | assay | BIAcore |
| | | Clone | | IC50 | IC50 | (Affinity) |
| | | name | CDR3 sequence | (nM) | (nM) | KD (M) |
| IL- | Immunised | 2.1 | GRRDDWKNNY | 3.7 | 280 | 7.0E-09 |
| 17RA | mouse | | SEQ ID NO 1267 | | | |
| | | 1.1 | EKGLGFCRGGSCSY | nd | 4.7 | 6.3E-11 |
| | | | FDY | | | |
| | | | SEQ ID NO 3 | | | |
| | | 5.1 | NGARYNWNYGDFQH | 80 | 73 | 4.1E-08 |
| | | | SEQ ID NO 2559 | | | |
| | | 4.1 | GGYNAWRTDY | nd | 282 | 4.5E-09 |
| | | | SEQ ID NO 2131 | | | |
| | | 3.1 | GWESGWFEP | 11 | Weak | 9.6E-09 |
| | | | SEQ ID NO 1767 | | | |
| | | 6.1 | KDITNIAVGSLGY | nd | 233 | 3.1E-08 |
| | | | SEQ ID NO 2575 | | | |
| | | 7.1 | SRDWGSRAFDI | nd | 1840 | 3.7E-07 |
| | | | SEQ ID NO 2579 | | | |

### Example 8. Optimisation of V_{H}

[0348] a. Optimisation of V_{H} Isolated from Immunised Mice

[0349] Where appropriate, a novel optimisation strategy was used to increase binding affinities of V_{H} isolated from immunised mice. Lead VH were aligned with other members of the same lineage to identify somatic hypermutation hot-spots targeted during the immune response (FIG. 13). The choice of amino acids at these positions formed the basis of a new recombination library approach, and led to the design of new libraries aimed at selecting higher affinity V_{H} with optimal amino acids at each mutation hot-spot.

[0350] As an example for IL-17RA, clone 2.1 was isolated directly from immunised TKO mouse. This V_{H} was shown to bind IL-17RA with high affinity Alignment of clone 2.1 with other members of the same lineage identified a number of amino acid positions that had been mutated during the immune response, and both V_{H}-CDRs and V_{H}-framework regions were affected. This information was then utilised to design a new clone 2.1 recombination library with the aim of identifying a higher affinity variant of clone 2.1. Following construction and phage display selection of a recombination library a new variant was isolated (2.2) that was improved in affinity by 10-fold.

[0351] Phusion High fidelity PCR master mix with HF buffer (cat # F531L, NEB) was used for the PCR reactions which were set up for each primer pairing as follows:

| | |
|---|---|
| Phusion HF 2x mix | 25 μl |
| Primers (10 uM) | 1.25 μl each (pairings as in table) |
| 53F9 plasmid DNA (34 ng/ul) | 0.5 μl |
| Nuclease-free H₂O | to 50 ul final volume |

PCR was performed as follows;

| | | |
|---|---|---|
| 98° C. 30 sec | | |
| 98° C. 10 sec | | |
| 58° C. 20 sec | {close oversize brace} | 31 cycles |
| 72° C. 20 sec | | |
| 72° C. 10 min | | |
| Hold at 10° C. | | |

[0352] The products of each PCR were analysed on a 1% agarose gel. Each product was then purified using Fermentas PCR purification kit (K0701) into 40 ul elution buffer. Assembly PCRs were then set up to rebuild the full V_{H} sequence:

| | |
|---|---|
| Phusion HF 2x mix | 25 μl |
| Purified PCR product 1 | 5 μl |
| Purified PCR product 2 | 5 μl |
| Purified PCR product 3 | 5 μl |
| Purified PCR product 4 | 5 μl |
| Purified PCR product 5 | 5 μl |

PCR was performed as follows;

| | | |
|---|---|---|
| 98° C. 30 sec | | |
| 98° C. 10 sec | | |
| 58° C. 20 sec | {close oversize brace} | 5 cycles |
| 72° C. 20 sec | | |

[0353] Added 0.5 ul of primers V3/pelB (long) and VH_J/F (long) (both 10 uM) to the reaction and then continued for a further 10 PCR cycles at the above conditions. The PCR product was analysed on a 1% agarose gel and purified using Fermentas PCR purification kit into 40 ul elution buffer. The PCR product was then used as a megaprimer for library construction as described above in Example 5, part b. Phage display selections and V_{H} screening was then performed as described in examples 7 and 8, following which several new variants of clone 2.1 were isolated with up to 10-fold improved affinities.

[0354] Following the lead optimisation steps, the potencies of improved V_{H} were as follows:

TABLE 10
a) V_{H} produced following optimisation
of anti-IL-17RA V_{H} family 2

| | | | Cell | | | |
|---|---|---|---|---|---|---|
| | | Biochem | assay | | | |
| VH | | IC50 | IC50 | BIAcore (Affinity) | | |
| name | CDR3 sequence | (nM) | (nM) | ka (1/Ms) | kd (1/s) | KD (M) |
| 2.1 | GRRDDWKNNY | 3.7 | 280 | 3.68E+05 | 2.63E-03 | 7.0E-09 |
| | SEQ ID NO 1267 | | | | | |
| 2.3 | GRRDNWKNNY | 1.3 | 118 | 5.55E+05 | 0.001368 | 2.50E-09 |
| | SEQ ID NO 1275 | | | | | |
| 2.2 | GRRDDWKNNY | 1.4 | 61 | 5.79E+05 | 7.99E-04 | 1.40E-09 |
| | SEQ ID NO 1271 | | | | | |

[0355] Optimised V_{H} show improved affinities to IL-17R and improved potencies in the IL-17R cell based assay due to slower off-rates (FIG. 15).

### Example 9—Characterisation of V_{H}

[0356] a. Specificity of Anti-IL-17A

[0357] The specificity of individual V_{H} for target antigen was confirmed by ELISA, following the methods described in Example 8(a). V_{H} were tested for binding to IL-17RA and shown not to cross-react with close relatives such as IL-17RB, IL-17RC and IL-17RD. (FIG. 14).

[0358] b. Epitope Mapping

[0359] VH were shown to bind to unique epitopes of IL-17RA using a BIAcore T200 instrument. Manual sensorgrams were initiated at 30 ul/min in HBS buffer and V_{H} injected as appropriate over the IL-17RA coupled CM5 chip coupled CM5 chip, plus a blank surface for reference subtraction (FIG. 15).

[0360] For IL-17RA, IL-17RA-Fc fusion protein was first captured on a protein G chip by injecting IL-17RA-Fc at 10 ug/ml in HBS buffer for 10 seconds. This surface was then used to measure binding and competition between different anti-IL-17RA V_{H} following the method described above. Epitope competition data is presented for 1.1 and 2.2 (FIG. 15). V_{H} were expressed from phagemid vector and have the following C terminal extension LEGGGS HHHHHH (SEQ ID NO.2606).

[0361] c. HPLC Size Exclusion Chromatography

[0362] Purified V_{H} (clones 1.1, 1.2, 2.1) were subjected to size exclusion chromatography. Briefly, purified V_{H} were analysed using a Water® 2795 Separation Module with a Waters® 2487 Dual λ #absorbance Detector—(Detected at 280 nM) and a TSKgel G2000SWXL (TOSOH) column. Samples were injected in 10-50 ul volumes and run in mobile phases of either 10% isopropanol/90% PBS or 100 mM Phosphate buffer, pH 6.8, 150 mM NaCl at a flow rate of 0.5 ml/min-0.7 ml/min. Data were collected for up to 35 minutes and the size of the V_{H} fraction compared with known standards (see FIG. 16). V_{H} were expressed from phagemid vector and have the following C terminal extension LEGGGS HHHHHH (SEQ ID NO.2606).

1. A binding molecule that binds human IL-17RA, comprising a human heavy chain variable immunoglobulin domain (V_{H}) that comprises a CDR1, a CDR2, and a CDR3 sequence,
a) wherein said CDR3 sequence comprises the amino acid sequence of SEQ ID NO. 3, or an amino acid sequence with at least 70%, at least 80%, at least 90%, or at least 95% homology thereto; or
b) wherein said CDR3 sequence comprises the amino acid sequence of SEQ ID NO. 1267, or an amino acid sequence with at least 70%, at least 80%, at least 90%, or at least 95% homology thereto; or
c) wherein said CDR3 sequence comprises the amino acid sequence of SEQ ID NO. 1767, or an amino acid sequence with at least 70%, at least 80%, at least 90%, or at least 95% homology thereto; or
d) wherein said CDR3 sequence comprises the amino acid sequence of SEQ ID NO. 2131, or an amino acid sequence with at least 70%, at least 80%, at least 90%, or at least 95% homology thereto; or
e) wherein said CDR3 sequence comprises the amino acid sequence of SEQ ID NO. 2559, or an amino acid sequence with at least 70%, at least 80%, at least 90%, or at least 95% homology thereto; or
f) wherein said CDR3 sequence comprises the amino acid sequence of SEQ ID NO. 2575, or an amino acid sequence with at least 70%, at least 80%, at least 90%, or at least 95% homology thereto; or
g) wherein said CDR3 sequence comprises the amino acid sequence of SEQ ID NO. 2579, or an amino acid sequence with at least 70%, at least 80%, at least 90%, or at least 95% homology thereto; and
wherein said molecule has a KD (M) value in the range of from 6×10⁻¹¹ to 3×10⁻⁷ when assessed by BIAcore.

2. The binding molecule according to claim 1 wherein said molecule is an immunoglobulin single domain antibody.

3. The binding molecule according to claim 1,
a) wherein said molecule comprises the amino acid sequence of SEQ ID NO. 3, or said amino acid sequence with homology thereto, and said CDR1 sequence comprises the amino acid sequence of SEQ ID NO. 1, or an amino acid sequence with at least 70%, at least 80%, at least 90%, or at least 95% homology thereto and said CDR2 sequence comprises the amino acid sequence of SEQ ID NO. 2, or an amino acid sequence with at least 70%, at least 80%, at least 90%, or at least 95% homology thereto; or
b) wherein said molecule comprises the amino acid sequence of SEQ ID NO. 1267, or said amino acid sequence with homology thereto, and said CDR1 sequence comprises the amino acid sequence of SEQ ID NO. 1265, or an amino acid sequence with at least 70%, at least 80%, at least 90%, or at least 95% homology thereto, and said CDR2 sequence comprises the amino acid sequence of SEQ ID NO. 1266, or an amino acid sequence with at least 70%, at least 80%, at least 90%, or at least 95% homology thereto; or
c) wherein said molecule comprises the amino acid sequence of SEQ ID NO. 1767, or said amino acid sequence with homology thereto, and said CDR1 sequence comprises the amino acid sequence of SEQ ID NO. 1765, or an amino acid sequence with at least 70%, at least 80%, at least 90%, or at least 95% homology thereto, and said CDR2 sequence comprises the amino acid sequence of SEQ ID NO. 1766, or an amino acid sequence with at least 70%, at least 80%, at least 90%, or at least 95% homology thereto; or
d) wherein said molecule comprises the amino acid sequence of SEQ ID NO. 2131, or said amino acid sequence with homology thereto, and said CDR1 sequence comprises the amino acid sequence of SEQ ID NO. 2129, or an amino acid sequence with at least 70%, at least 80%, at least 90%, or at least 95% homology thereto, and said CDR2 sequence comprises the amino acid sequence of SEQ ID NO. 2130, or an amino acid sequence with at least 70%, at least 80%, at least 90%, or at least 95% homology thereto; or
e) wherein said molecule comprises the amino acid sequence of SEQ ID NO. 2559, or said amino acid sequence with homology thereto, and said CDR1 sequence comprises the amino acid sequence of SEQ ID NO. 2557, or an amino acid sequence with at least 70%, at least 80%, at least 90%, or at least 95% homology thereto, and said CDR2 sequence comprises the amino acid sequence of SEQ ID NO. 2558, or an amino acid sequence with at least 70%, at least 80%, at least 90%, or at least 95% homology thereto; or
f) wherein said molecule comprises the amino acid sequence of SEQ ID NO. 2575, or said amino acid sequence with homology thereto, and said CDR1 sequence comprises the amino acid sequence of SEQ ID NO. 2573, or an amino acid sequence with at least 70%, at least 80%, at least 90%, or at least 95% homology thereto, and said CDR2 sequence comprises the amino acid sequence of SEQ ID NO. 2574, or an amino acid sequence with at least 70%, at least 80%, at least 90%, or at least 95% homology thereto; or
g) wherein said molecule comprises the amino acid sequence of SEQ ID NO. 2579, or said amino acid sequence with homology thereto, and said CDR1 sequence comprises the amino acid sequence of SEQ ID NO. 2577, or an amino acid sequence with at least 70%, at least 80%, at least 90%, or at least 95% homology thereto, and said CDR2 sequence comprises the amino acid sequence of SEQ ID NO. 2578, or an amino acid sequence with at least 70%, at least 80%, at least 90%, or at least 95% homology thereto.

4. The binding molecule according to claim 3,
(a) wherein said CDR1 sequence comprises or consists of the amino acid sequence of SEQ ID NO. 1, 5, 9, 13, 17 or 21, said CDR2 sequence comprises or consists of the amino acid sequence of SEQ ID NO. 2, 6, 10, 14, 18 or 22, and said CDR3 sequence comprises or consists of the amino acid sequence of SEQ ID NO: 3, 7, 11, 15, 19 or 23; or
(b) wherein said CDR1 sequence comprises or consists of the amino acid sequence of SEQ ID NO. 1265, 1269, or 1273, said CDR2 sequence comprises or consists of the amino acid sequence of SEQ ID NO. 1266, 1270, or 1274, and said CDR3 comprises or consists of the amino acid sequence of SEQ ID NO. 1267, 1271, or 1275;
c) wherein said CDR1 sequence comprises or consists of the amino acid sequence of SEQ ID NO. 1765, said CDR2 sequence comprises or consists of the amino acid sequence of SEQ ID NO. 1766, and said CDR3 sequence comprises or consists of the amino acid sequence SEQ ID NO: 1767;
d) wherein said CDR1 sequence comprises or consists of the amino acid sequence of SEQ ID NO. 2129, said CDR2 sequence comprises or consists of the amino acid sequence of SEQ ID NO. 2130, and said CDR3 sequence comprises or consists of the amino acid sequence SEQ ID NO: 2131;
e) wherein said CDR1 sequence comprises or consists of the amino acid sequence of SEQ ID NO. 2557, said CDR2 sequence comprises or consists of the amino acid sequence of SEQ ID NO. 2558, and said CDR3 sequence comprises or consists of the amino acid sequence SEQ ID NO: 2559;
f) wherein said CDR1 sequence comprises or consists of the amino acid sequence of SEQ ID NO. 2573, said CDR2 sequence comprises or consists of the amino acid sequence of SEQ ID NO. 2574, and said CDR3 sequence comprises or consists of the amino acid sequence SEQ ID NO: 2575; or
(g) wherein said CDR1 sequence comprises or consists of the amino acid sequence of SEQ ID NO. 2577, said CDR2 sequence comprises or consists of the amino acid sequence of SEQ ID NO. 2578, and said CDR3 sequence comprises or consists of the amino acid sequence SEQ ID NO: 2579.

5. (canceled)

6. The binding molecule according to claim 1 wherein said V_{H} domain comprises or consists of the amino acid sequence of SEQ ID NO. 4, 1268, 1768, 2132, 2560, 2576, or 2580, or an amino acid sequence with at least 70%, 80%, 90% or 95% homology to any one of said amino acid sequences; or wherein said V_{H} domain comprises or consist of the amino acid sequence of SEQ ID NO. 8, 12, 16, 20, or 24.

7-46. (canceled)

47. The binding molecule according to claim 1, wherein said binding molecule further comprises:
one or more additional V_{H} domains; and/or
a conjugated toxin, enzyme, or radioisotope.

48-50. (canceled)

51. A binding molecule that competes for binding to human IL-17RA with the binding molecule of claim 1.

52. A pharmaceutical composition comprising the binding molecule according to claim 1 and a pharmaceutical carrier.

53. The pharmaceutical composition according to claim 52,
wherein the composition is formulated for administration topically to the skin; and/or
wherein the composition further comprises a chemical skin penetration enhancer.

54. A method for treating at least one disease or condition selected from the group consisting of an autoimmune disease, an inflammatory condition, an allergy, an allergic condition, a hypersensitivity reaction, a severe infection, and an organ or tissue transplant rejection, comprising:
administering an effective amount of the pharmaceutical composition according to claim 52.

55-63. (canceled)

64. The method according to claim 54 wherein said disease or condition is at least one selected from the group consisting of: psoriasis, spondyloarthropathies, uveitis, atopic dermatitis, systemic lupus erythematosis, rheumatoid arthritis, osteoarthritis, juvenile chronic arthritis, systemic sclerosis, idiopathic inflammatory myopathies, Sjogren's syndrome, systemic vasculitis, sarcoidosis, autoimmune hemolytic anemia, autoimmune thrombocytopenia, thyroiditis, diabetes mellitus, immune-mediated renal disease, a demyelinating disease of the central and peripheral nervous systems, multiple sclerosis, idiopathic demyelinating polyneuropathy, Guillain Barre syndrome, chronic inflammatory demyelinating polyneuropathy, a hepatobiliary disease, infectious hepatitis, autoimmune chronic active hepatitis, primary biliary cirrhosis, granulomatous hepatitis, sclerosing cholangitis, inflammatory bowel disease, gluten-sensitive enteropathy, Whipple's disease, an autoimmune skin disease, an immune-mediated skin disease, bullous skin disease, erythema multiforme, contact dermatitis, disease, asthma, allergic rhinitis, food hypersensitivity, urticaria, an immunologic disease of the lung, eosinophilic pneumonia, idiopathic pulmonary fibrosis, hypersensitivity pneumonitis, an autoimmune haematological disorder, hemolytic anaemia, aplastic anaemia, pure red cell anaemia, idiopathic thrombocytopenia, autoimmune inflammatory bowel disease, ulcerative colitis, Crohn's disease, Irritable Bowel Syndrome, a transplantation associated disease, graft rejection, and graft-versus-host-disease.

65. An in vivo or in vitro method for reducing human IL-17RA activity comprising contacting human IL-17RA with the binding molecule according to claim 1.

66. A method for determining the presence of IL-17RA in a test sample by an immunoassay comprising:
contacting said sample with the binding molecule according to claim 1 and at least one detectable label.

67. (canceled)

68. An isolated nucleic acid molecule comprising a nucleotide sequence encoding the binding molecule according to claim 1.

69. A nucleic construct comprising the nucleic acid according to claim 68.

70. An isolated host cell comprising the construct according to claim 69.

71. A method for producing the binding molecule according to claim 1 comprising expressing a nucleic acid encoding the binding molecule in a host cell and isolating the binding molecule from the host cell culture.

72. A kit comprising the binding molecule according to claim 1.

73. A method for producing a binding molecule comprising at least one immunoglobulin single domain antibody that binds IL-17RA, wherein said domain is a human V_{H} domain, said method comprising
a) immunizing a transgenic mouse with an IL-17RA antigen, wherein said transgenic mouse expresses a nucleic acid construct comprising human heavy chain V_{H} genes and is not capable of making functional endogenous light or heavy chains;
b) generating a library from said mouse, wherein said library comprises amino acid sequences that comprise V_{H} domain amino acid sequences; and
c) isolating at least one amino acid sequence comprising said V_{H} domain amino acid sequence from said library,
thereby obtaining said binding molecule comprising a single domain antibody that comprises a human V_{H} domain for binding IL-17RA.

74. A biparatopic, bivalent, or multispecific binding molecule comprising the binding molecule according to claim 1.

The application's sequence listing, which the Patent Office published only in electronic form, follows.

SEQUENCE LISTING (2606 sequences)

SEQ ID NO: 1 - protein, 5 aa, Artificial Sequence
  source: /note="Description of Artificial Sequence: sequence motif"
DYAMH

SEQ ID NO: 2 - protein, 17 aa, Artificial Sequence
  source: /note="Description of Artificial Sequence: sequence motif"
GISWNSGRMDYADSVKG

SEQ ID NO: 3 - protein, 17 aa, Artificial Sequence
  source: /note="Description of Artificial Sequence: sequence motif"
EKGLGFCRGGSCSYFDY

SEQ ID NO: 4 - protein, 126 aa, Artificial Sequence
  source: /note="Description of Artificial Sequence: IL-17RA binding protein"
QVQLVESGGGLVQPGRSLRLSCAASGFTFDDYAMHWVRQAPGKGLEWVSGISWNSGRMDYADSVKGRFTISRDNAKKSLYLQMNSLRAEDTAMYYCAKEKGLGFCRGGSCSYFDYRGQGTLVTVSS

SEQ ID NO: 5 - protein, 5 aa, Artificial Sequence
  source: /note="Description of Artificial Sequence: sequence motif"
DYAMH

SEQ ID NO: 6 - protein, 17 aa, Artificial Sequence
  source: /note="Description of Artificial Sequence: sequence motif"
GISWNSGRMDYADSVKG

SEQ ID NO: 7 - protein, 17 aa, Artificial Sequence
  source: /note="Description of Artificial Sequence: sequence motif"
EKGLGYCRGGSCSYFDY

SEQ ID NO: 8 - protein, 126 aa, Artificial Sequence
  source: /note="Description of Artificial Sequence: IL-17RA binding protein"
EVQLVESGGGLVQPGRSLRLSCAASGFTFDDYAMHWVRQAPGKGLEWVSGISWNSGRMDYADSVKGRFTISRDNAKNSLYLQMNSLRAEDTALYYCAKEKGLGYCRGGSCSYFDYRGQGTLVTVSS

SEQ ID NO: 9 - protein, 5 aa, Artificial Sequence
  source: /note="Description of Artificial Sequence: sequence motif"
DYALH

SEQ ID NO: 10 - protein, 17 aa, Artificial Sequence
  source: /note="Description of Artificial Sequence: sequence motif"
GISWNSGRKDYADTVKG

SEQ ID NO: 11 - protein, 17 aa, Artificial Sequence
  source: /note="Description of Artificial Sequence: sequence motif"
EKGLGFCRGGSCSYFDY

SEQ ID NO: 12 - protein, 126 aa, Artificial Sequence
  source: /note="Description of Artificial Sequence: IL-17RA binding protein"
QVQLVESGGGLVQPGRSLRLSCAASGFTFADYALHWVRQAPGKGLEWVSGISWNSGRKDYADTVKGRFTISRDNAKKSLYLQMNSLRAEDTAMYYCAKEKGLGFCRGGSCSYFDYRGQGTLVTVSS

SEQ ID NO: 13 - protein, 5 aa, Artificial Sequence
  source: /note="Description of Artificial Sequence: sequence motif"
DYALH

SEQ ID NO: 14 - protein, 17 aa, Artificial Sequence
  source: /note="Description of Artificial Sequence: sequence motif"
GISWNAGRKDYADTVKG

SEQ ID NO: 15 - protein, 17 aa, Artificial Sequence
  source: /note="Description of Artificial Sequence: sequence motif"
EKGLGFCRGGSCSYFDY

SEQ ID NO: 16 - protein, 126 aa, Artificial Sequence
  source: /note="Description of Artificial Sequence: IL-17RA binding protein"
QVQLVESGGGLVQPGRSLRLSCAASGFTFADYALHWVRQAPGKGLEWVSGISWNAGRKDYADTVKGRFTISRDNAKKSLYLQMNSLRAEDTAMYYCAKEKGLGFCRGGSCSYFDYRGQGTLVTVSS

SEQ ID NO: 17 - protein, 5 aa, Artificial Sequence
  source: /note="Description of Artificial Sequence: sequence motif"
DYALH

SEQ ID NO: 18 - protein, 17 aa, Artificial Sequence
  source: /note="Description of Artificial Sequence: sequence motif"
GISWNSGRKDYADTVKG

SEQ ID NO: 19 - protein, 17 aa, Artificial Sequence
  source: /note="Description of Artificial Sequence: sequence motif"
EKGLGYCRGGSCSYFDY

SEQ ID NO: 20 - protein, 126 aa, Artificial Sequence
  source: /note="Description of Artificial Sequence: IL-17RA binding protein"
EVQLVESGGGLVQPGRSLRLSCAASGFTFADYALHWVRQAPGKGLEWVSGISWNSGRKDYADTVKGRFTISRDNAKNSLYLQMNSLRAEDTALYYCAKEKGLGYCRGGSCSYFDYRGQGTLVTVSS

SEQ ID NO: 21 - protein, 5 aa, Artificial Sequence
  source: /note="Description of Artificial Sequence: sequence motif"
DYALH

SEQ ID NO: 22 - protein, 17 aa, Artificial Sequence
  source: /note="Description of Artificial Sequence: sequence motif"
GISWNAGRKDYADTVKG

SEQ ID NO: 23 - protein, 17 aa, Artificial Sequence
  source: /note="Description of Artificial Sequence: sequence motif"
EKGLGYCRGGSCSYFDY

SEQ ID NO: 24 - protein, 126 aa, Artificial Sequence
  source: /note="Description of Artificial Sequence: IL-17RA binding protein"
EVQLVESGGGLVQPGRSLRLSCAASGFTFADYALHWVRQAPGKGLEWVSGISWNAGRKDYADTVKGRFTISRDNAKNSLYLQMNSLRAEDTALYYCAKEKGLGYCRGGSCSYFDYRVQGTLVTVSS

SEQ ID NO: 25 - protein, 5 aa, Artificial Sequence
  source: /note="Description of Artificial Sequence: sequence motif"
DYAMH

SEQ ID NO: 26 - protein, 17 aa, Artificial Sequence
  source: /note="Description of Artificial Sequence: sequence motif"
GISWNSGRIGYADSVKG

SEQ ID NO: 27 - protein, 17 aa, Artificial Sequence
  source: /note="Description of Artificial Sequence: sequence motif"
ESSLGYCSGGSCSSFDY

SEQ ID NO: 28 - protein, 126 aa, Artificial Sequence
  source: /note="Description of Artificial Sequence: IL-17RA binding protein"
EVQLVESGGGLVQPGRSLRLSCAASGFTFDDYAMHWVRQAPGKGLEWVSGISWNSGRIGYADSVKGRFTISRDNAKNSLYLQMNSLRAEDTALYYCAKESSLGYCSGGSCSSFDYWGQGTLVTVSS

SEQ ID NO: 29 - protein, 5 aa, Artificial Sequence
  source: /note="Description of Artificial Sequence: sequence motif"
DYAMH

SEQ ID NO: 30 - protein, 17 aa, Artificial Sequence
  source: /note="Description of Artificial Sequence: sequence motif"
GISWNSGRIGYADSVKG

SEQ ID NO: 31 - protein, 17 aa, Artificial Sequence
  source: /note="Description of Artificial Sequence: sequence motif"
ESSLGYCSGGSCSSFDY

SEQ ID NO: 32 - protein, 126 aa, Artificial Sequence; identical to SEQ ID NO: 28
  source: /note="Description of Artificial Sequence: IL-17RA binding protein"

SEQ ID NO: 33 - protein, 5 aa, Artificial Sequence
  source: /note="Description of Artificial Sequence: sequence motif"
DYAMH

SEQ ID NO: 34 - protein, 17 aa, Artificial Sequence
  source: /note="Description of Artificial Sequence: sequence motif"
GISWNSGRIGYADSVKG

SEQ ID NO: 35 - protein, 17 aa, Artificial Sequence
  source: /note="Description of Artificial Sequence: sequence motif"
ESSLGYCSGGSCSSFDY

SEQ ID NO: 36 - protein, 126 aa, Artificial Sequence; identical to SEQ ID NO: 28
  source: /note="Description of Artificial Sequence: IL-17RA binding protein"

SEQ ID NO: 37 - protein, 5 aa, Artificial Sequence
  source: /note="Description of Artificial Sequence: sequence motif"
DYAMH

SEQ ID NO: 38 - protein, 17 aa, Artificial Sequence
  source: /note="Description of Artificial Sequence: sequence motif"
GISWNSGRIGYADSVKG

SEQ ID NO: 39 - protein, 17 aa, Artificial Sequence
  source: /note="Description of Artificial Sequence: sequence motif"
ESSLGYCSGGSCSSFDY

SEQ ID NO: 40 - protein, 126 aa, Artificial Sequence; identical to SEQ ID NO: 28
  source: /note="Description of Artificial Sequence: IL-17RA binding protein"

SEQ ID NO: 41 - protein, 5 aa, Artificial Sequence
  source: /note="Description of Artificial Sequence: sequence motif"
DYAMH

SEQ ID NO: 42 - protein, 17 aa, Artificial Sequence
  source: /note="Description of Artificial Sequence: sequence motif"
GISWNSGRIGYADSVKG

SEQ ID NO: 43 - protein, 17 aa, Artificial Sequence
  source: /note="Description of Artificial Sequence: sequence motif"
ESSLGYCSGGSCSSFDY

SEQ ID NO: 44 - protein, 126 aa, Artificial Sequence; identical to SEQ ID NO: 28
  source: /note="Description of Artificial Sequence: IL-17RA binding protein"

SEQ ID NO: 45 - protein, 5 aa, Artificial Sequence
  source: /note="Description of Artificial Sequence: sequence motif"
DYAMH

SEQ ID NO: 46 - protein, 17 aa, Artificial Sequence
  source: /note="Description of Artificial Sequence: sequence motif"
GISWNSGRIGYADSVKG

SEQ ID NO: 47 - protein, 17 aa, Artificial Sequence
  source: /note="Description of Artificial Sequence: sequence motif"
ESSLGYCSGGSCSSFDY

SEQ ID NO: 48 - protein, 126 aa, Artificial Sequence; identical to SEQ ID NO: 28
  source: /note="Description of Artificial Sequence: IL-17RA binding protein"

SEQ ID NO: 49 - protein, 5 aa, Artificial Sequence
  source: /note="Description of Artificial Sequence: sequence motif"
DYAMH

SEQ ID NO: 50 - protein, 17 aa, Artificial Sequence
  source: /note="Description of Artificial Sequence: sequence motif"
GISWNSGRIGYADSVKG

SEQ ID NO: 51 - protein, 17 aa, Artificial Sequence
  source: /note="Description of Artificial Sequence: sequence motif"
ESSLGYCSGGSCSSFDY

SEQ ID NO: 52 - protein, 126 aa, Artificial Sequence; identical to SEQ ID NO: 28
  source: /note="Description of Artificial Sequence: IL-17RA binding protein"

SEQ ID NO: 53 - protein, 5 aa, Artificial Sequence
  source: /note="Description of Artificial Sequence: sequence motif"
DYAMH

SEQ ID NO: 54 - protein, 17 aa, Artificial Sequence
  source: /note="Description of Artificial Sequence: sequence motif"
GISWNSGRIGYADSVKG

SEQ ID NO: 55 - protein, 17 aa, Artificial Sequence
  source: /note="Description of Artificial Sequence: sequence motif"
ESSLGYCSGGSCSSFDY

SEQ ID NO: 56 - protein, 126 aa, Artificial Sequence; identical to SEQ ID NO: 28
  source: /note="Description of Artificial Sequence: IL-17RA binding protein"

SEQ ID NO: 57 - protein, 5 aa, Artificial Sequence
  source: /note="Description of Artificial Sequence: sequence motif"
DYAMH

SEQ ID NO: 58 - protein, 17 aa, Artificial Sequence
  source: /note="Description of Artificial Sequence: sequence motif"
GISWNSGRIGYADSVKG

SEQ ID NO: 59 - protein, 17 aa, Artificial Sequence
  source: /note="Description of Artificial Sequence: sequence motif"
ESSLGYCSGGSCSSFDY

SEQ ID NO: 60 - protein, 126 aa, Artificial Sequence; identical to SEQ ID NO: 28
  source: /note="Description of Artificial Sequence: IL-17RA binding protein"

SEQ ID NO: 61 - protein, 5 aa, Artificial Sequence
  source: /note="Description of Artificial Sequence: sequence motif"
DYAMH

SEQ ID NO: 62 - protein, 17 aa, Artificial Sequence
  source: /note="Description of Artificial Sequence: sequence motif"
GISWNSGRIGYADSVKG

SEQ ID NO: 63 - protein, 17 aa, Artificial Sequence
  source: /note="Description of Artificial Sequence: sequence motif"
ESSLGYCSGGSCSSFDY

SEQ ID NO: 64 - protein, 126 aa, Artificial Sequence; identical to SEQ ID NO: 28
  source: /note="Description of Artificial Sequence: IL-17RA binding protein"

SEQ ID NO: 65 - protein, 5 aa, Artificial Sequence
  source: /note="Description of Artificial Sequence: sequence motif"
DYAMH

SEQ ID NO: 66 - protein, 17 aa, Artificial Sequence
  source: /note="Description of Artificial Sequence: sequence motif"
GISWNSGRIGYADSVKG

SEQ ID NO: 67 - protein, 17 aa, Artificial Sequence
  source: /note="Description of Artificial Sequence: sequence motif"
ESSLGYCSGGSCSSFDY

SEQ ID NO: 68 - protein, 126 aa, Artificial Sequence; identical to SEQ ID NO: 28
  source: /note="Description of Artificial Sequence: IL-17RA binding protein"

SEQ ID NO: 69 - protein, 5 aa, Artificial Sequence
  source: /note="Description of Artificial Sequence: sequence motif"
DYAMH

SEQ ID NO: 70 - protein, 17 aa, Artificial Sequence
  source: /note="Description of Artificial Sequence: sequence motif"
GISWNSGRIGYADSVKG

SEQ ID NO: 71 - protein, 17 aa, Artificial Sequence
  source: /note="Description of Artificial Sequence: sequence motif"
ESSLGYCSGGSCSSFDY

SEQ ID NO: 72 - protein, 126 aa, Artificial Sequence
  source: /note="Description of Artificial Sequence: IL-17RA binding protein"
QVQLVESGGGLVQPGRSLRLSCAASGFTFDDYAMHWVRQAPGKGLEWVSGISWNSGRIGYADSVKGRFTISRDNAKNSLYLQMNSLRAEDTALYYCAKESSLGYCSGGSCSSFDYWGQGTLVTVSS

SEQ ID NO: 73 - protein, 5 aa, Artificial Sequence
  source: /note="Description of Artificial Sequence: sequence motif"
DYAMH

SEQ ID NO: 74 - protein, 17 aa, Artificial Sequence
  source: /note="Description of Artificial Sequence: sequence motif"
GISWNSGRIGYADSVKG

SEQ ID NO: 75 - protein, 17 aa, Artificial Sequence
  source: /note="Description of Artificial Sequence: sequence motif"
ESSLGYCSGGSCSSFDY

SEQ ID NO: 76 - protein, 126 aa, Artificial Sequence; identical to SEQ ID NO: 72
  source: /note="Description of Artificial Sequence: IL-17RA binding protein"

SEQ ID NO: 77 - protein, 5 aa, Artificial Sequence
  source: /note="Description of Artificial Sequence: sequence motif"
DYAMH

SEQ ID NO: 78 - protein, 17 aa, Artificial Sequence
  source: /note="Description of Artificial Sequence: sequence motif"
GISWNSGRIGYADSVKG

SEQ ID NO: 79 - protein, 17 aa, Artificial Sequence
  source: /note="Description of Artificial Sequence: sequence motif"
ESSLGYCSGGSCSSFDY

SEQ ID NO: 80 - protein, 126 aa, Artificial Sequence; identical to SEQ ID NO: 72
  source: /note="Description of Artificial Sequence: IL-17RA binding protein"

SEQ ID NO: 81 - protein, 5 aa, Artificial Sequence
  source: /note="Description of Artificial Sequence: sequence motif"
DYAMH

SEQ ID NO: 82 - protein, 17 aa, Artificial Sequence
  source: /note="Description of Artificial Sequence: sequence motif"
GISWNSGRKGYADSVKG

SEQ ID NO: 83 - protein, 17 aa, Artificial Sequence
  source: /note="Description of Artificial Sequence: sequence motif"
DSSLGYCSGGSCSSFDY

SEQ ID NO: 84 - protein, 126 aa, Artificial Sequence
  source: /note="Description of Artificial Sequence: IL-17RA binding protein"
EVQLVESGGGLVQPGRSLRLSCAASGFTFDDYAMHWVRQAPGKGLEWVSGISWNSGRKGYADSVKGRFTISRDNAKNSLYLQMNSLRAEDTALYYCAKDSSLGYCSGGSCSSFDYWGQGTLVTVSS

SEQ ID NO: 85 - protein, 5 aa, Artificial Sequence
  source: /note="Description of Artificial Sequence: sequence motif"
DYAMH

SEQ ID NO: 86 - protein, 17 aa, Artificial Sequence
  source: /note="Description of Artificial Sequence: sequence motif"
GISWNSGRKGYADSVKG

SEQ ID NO: 87 - protein, 17 aa, Artificial Sequence
  source: /note="Description of Artificial Sequence: sequence motif"
DSSLGYCSGGSCSSFDY

SEQ ID NO: 88 - protein, 126 aa, Artificial Sequence
  source: /note="Description of Artificial Sequence: IL-17RA binding protein"
QVQLVESGGGLVQPGRSLRLSCAASGFTFDDYAMHWVRQAPGKGLEWVSGISWNSGRKGYADSVKGRFTISRDNAKNSLYLQMNSLRAEDTALYYCAKDSSLGYCSGGSCSSFDYWGQGTLVTVSS

SEQ ID NO: 89 - protein, 5 aa, Artificial Sequence
  source: /note="Description of Artificial Sequence: sequence motif"
DYAMH

SEQ ID NO: 90 - protein, 17 aa, Artificial Sequence
  source: /note="Description of Artificial Sequence: sequence motif"
GISWNSGRKGYADSVKG

SEQ ID NO: 91 - protein, 17 aa, Artificial Sequence
  source: /note="Description of Artificial Sequence: sequence motif"
DSSLGYCSGGSCSSFDY

SEQ ID NO: 92 - protein, 126 aa, Artificial Sequence; identical to SEQ ID NO: 88
  source: /note="Description of Artificial Sequence: IL-17RA binding protein"

SEQ ID NO: 93 - protein, 5 aa, Artificial Sequence
  source: /note="Description of Artificial Sequence: sequence motif"
DYAMH

SEQ ID NO: 94 - protein, 17 aa, Artificial Sequence
  source: /note="Description of Artificial Sequence: sequence motif"
GISWNSGRKGYADSVKG

SEQ ID NO: 95 - protein, 17 aa, Artificial Sequence
  source: /note="Description of Artificial Sequence: sequence motif"
DSSLGYCSGGSCSSFDY

SEQ ID NO: 96 - protein, 126 aa, Artificial Sequence
  source: /note="Description of Artificial Sequence: IL-17RA binding protein"
EVQLVESGGGLVQPGKSLRLSCAASGFTFDDYAMHWVRQAPGKGLEWVSGISWNSGRKGYADSVKGRFTISRDNAKNSLYLQMNSLRAEDTALYYCAKDSSLGYCSGGSCSSFDYWGQGALVTVSS

SEQ ID NO: 97 - protein, 5 aa, Artificial Sequence
  source: /note="Description of Artificial Sequence: sequence motif"
DYAMH

SEQ ID NO: 98 - protein, 17 aa, Artificial Sequence
  source: /note="Description of Artificial Sequence: sequence motif"
GISWNGGRIDYADSVKG

SEQ ID NO: 99 - protein, 17 aa, Artificial Sequence
  source: /note="Description of Artificial Sequence: sequence motif"
DSSLGYCSGGSCSSFDY

SEQ ID NO: 100 - protein, 126 aa, Artificial Sequence
  source: /note="Description of Artificial Sequence: IL-17RA binding protein"
EVQLVESGGGLVQPGRSLRLSCAASGFTFADYAMHWVRQAPGKGLEWVSGISWNGGRIDYADSVKGRFTISRDNAKNSLYLQMNSLRAEDTALYYCAKDSSLGYCSGGSCSSFDYWGQGTLVTVSS

SEQ ID NO: 101 - protein, 5 aa, Artificial Sequence
  source: /note="Description of Artificial Sequence: sequence motif"
DYAMH

SEQ ID NO: 102 - protein, 17 aa, Artificial Sequence
  source: /note="Description of Artificial Sequence: sequence motif"
GISWNGGRIDYADSVKG

SEQ ID NO: 103 - protein, 17 aa, Artificial Sequence
  source: /note="Description of Artificial Sequence: sequence motif"
DSSLGYCSGGSCSSFDY

SEQ ID NO: 104 - protein, 126 aa, Artificial Sequence; identical to SEQ ID NO: 100
  source: /note="Description of Artificial Sequence: IL-17RA binding protein"

SEQ ID NO: 105 - protein, 5 aa, Artificial Sequence
  source: /note="Description of Artificial Sequence: sequence motif"
DYAMH

SEQ ID NO: 106 - protein, 17 aa, Artificial Sequence
  source: /note="Description of Artificial Sequence: sequence motif"
GISWNSGRKGYADSVKG

SEQ ID NO: 107 - protein, 17 aa, Artificial Sequence
  source: /note="Description of Artificial Sequence: sequence motif"
ESSLGYCSGGSCSNFDY

SEQ ID NO: 108 - protein, 126 aa, Artificial Sequence
  source: /note="Description of Artificial Sequence: IL-17RA binding protein"
EVQLVESGGGLVQPGRSLRLSCAASGFTFDDYAMHWVRQAPGKGLEWVSGISWNSGRKGYADSVKGRFTISRDNAKKCLYLQMNSLRAEDTALYYCAKESSLGYCSGGSCSNFDYWGQGTLVTVSS

SEQ ID NO: 109 - protein, 5 aa, Artificial Sequence
  source: /note="Description of Artificial Sequence: sequence motif"
DYAMH

SEQ ID NO: 110 - protein, 17 aa, Artificial Sequence
  source: /note="Description of Artificial Sequence: sequence motif"
GISWNSGRKGYADSVKG

SEQ ID NO: 111 - protein, 17 aa, Artificial Sequence
  source: /note="Description of Artificial Sequence: sequence motif"
ESSLGYCSGGSCSNFDY

SEQ ID NO: 112 - protein, 126 aa, Artificial Sequence; identical to SEQ ID NO: 108
  source: /note="Description of Artificial Sequence: IL-17RA binding protein"

SEQ ID NO: 113 - protein, 5 aa, Artificial Sequence
  source: /note="Description of Artificial Sequence: sequence motif"
DYAMH

SEQ ID NO: 114 - protein, 17 aa, Artificial Sequence
  source: /note="Description of Artificial Sequence: sequence motif"
GISWNSGRKGYADSVKG

SEQ ID NO: 115 - protein, 17 aa, Artificial Sequence
  source: /note="Description of Artificial Sequence: sequence motif"
ESSLGYCSGGSCSNFDY

SEQ ID NO: 116 - protein, 126 aa, Artificial Sequence
  source: /note="Description of Artificial Sequence: IL-17RA binding protein"
RVQLVESGGGLVQPGRSLRLSCAASGFTFDDYAMHWVRQAPGKGLEWVSGISWNSGRKGYADSVKGRFTISRDNAKKCLYLQMNSLRAEDTALYYCAKESSLGYCSGGSCSNFDYWGQGTLVTVSS

SEQ ID NO: 117 - protein, 5 aa, Artificial Sequence
  source: /note="Description of Artificial Sequence: sequence motif"
DYAMH

SEQ ID NO: 118 - protein, 17 aa, Artificial Sequence
  source: /note="Description of Artificial Sequence: sequence motif"
GISWNSGRKGYADSVKG

SEQ ID NO: 119 - protein, 17 aa, Artificial Sequence
  source: /note="Description of Artificial Sequence: sequence motif"
DSSLGYCSGGSCSNFDY

SEQ ID NO: 120 - protein, 126 aa, Artificial Sequence
  source: /note="Description of Artificial Sequence: IL-17RA binding protein"
EVQLVESGGGLVQPGRSLRLSCAASGFTFDDYAMHWVRQAPGKGLEWVSGISWNSGRKGYADSVKGRFTISRDNAKKSLYLQMNSLRAEDTALYYCAKDSSLGYCSGGSCSNFDYWGQGTLVTVSS

SEQ ID NO: 121 - protein, 5 aa, Artificial Sequence
  source: /note="Description of Artificial Sequence: sequence motif"
DYAMH

SEQ ID NO: 122 - protein, 17 aa, Artificial Sequence
  source: /note="Description of Artificial Sequence: sequence motif"
GISWNSGRKGYADSVKG

SEQ ID NO: 123 - protein, 17 aa, Artificial Sequence
  source: /note="Description of Artificial Sequence: sequence motif"
DSSLGYCSGGSCSNFDY

SEQ ID NO: 124 - protein, 126 aa, Artificial Sequence; identical to SEQ ID NO: 120
  source: /note="Description of Artificial Sequence: IL-17RA binding protein"

SEQ ID NO: 125 - protein, 5 aa, Artificial Sequence
  source: /note="Description of Artificial Sequence: sequence motif"
DYAMH

SEQ ID NO: 126 - protein, 17 aa, Artificial Sequence
  source: /note="Description of Artificial Sequence: sequence motif"
GISWNSGRKDYADSVKG

SEQ ID NO: 127 - protein, 17 aa, Artificial Sequence
  source: /note="Description of Artificial Sequence: sequence motif"
DSSLGYCSGGSCSSFDY

SEQ ID NO: 128 - protein, 126 aa, Artificial Sequence
  source: /note="Description of Artificial Sequence: IL-17RA binding protein"
EVQLVESGGGLVQPGRSLRLACAASGFTFDDYAMHWVRQAPGKGLEWVSGISWNSGRKDYADSVKGRFTISRDNAKNSLYLQMNSLRAEDTALYYCAKDSSLGYCSGGSCSSFDYWGQGTLVTVSS

SEQ ID NO: 129 - protein, 5 aa, Artificial Sequence
  source: /note="Description of Artificial Sequence: sequence motif"
DYAMH

SEQ ID NO: 130 - protein, 17 aa, Artificial Sequence
  source: /note="Description of Artificial Sequence: sequence motif"
GISWNSGRIGYADSVKG

SEQ ID NO: 131 - protein, 17 aa, Artificial Sequence
  source: /note="Description of Artificial Sequence: sequence motif"
ESSLGYCSGGSCSSFDY

SEQ ID NO: 132 - protein, 126 aa, Artificial Sequence
  source: /note="Description of Artificial Sequence: IL-17RA binding protein"
QVQLVESGGGLVQPGRSLRLSCAASGFTFDDYAMHWVRQAPGKGLEWVSGISWNSGRIGYADSVKGRFTISRDNAKKSLYLQMNSLRAEDTALYYCAKESSLGYCSGGSCSSFDYRGQGTLVTVSS

SEQ ID NO: 133 - protein, 5 aa, Artificial Sequence
  source: /note="Description of Artificial Sequence: sequence motif"
DYAMH

SEQ ID NO: 134 - protein, 17 aa, Artificial Sequence
  source: /note="Description of Artificial Sequence: sequence motif"
GISWNSGRIGYADSVKG

SEQ ID NO: 135 - protein, 17 aa, Artificial Sequence
  source: /note="Description of Artificial Sequence: sequence motif"
ESSLGYCSGGSCSSFDY

SEQ ID NO: 136 - protein, 126 aa, Artificial Sequence; identical to SEQ ID NO: 132
  source: /note="Description of Artificial Sequence: IL-17RA binding protein"

SEQ ID NO: 137 - protein, 5 aa, Artificial Sequence
  source: /note="Description of Artificial Sequence: sequence motif"
DYAMH

SEQ ID NO: 138 - protein, 17 aa, Artificial Sequence
  source: /note="Description of Artificial Sequence: sequence motif"
GISWNSGRIGYADSVKG

SEQ ID NO: 139 - protein, 17 aa, Artificial Sequence
  source: /note="Description of Artificial Sequence: sequence motif"
ESSLGYCSGGSCSSFDY

SEQ ID NO: 140 - protein, 126 aa, Artificial Sequence; identical to SEQ ID NO: 132
  source: /note="Description of Artificial Sequence: IL-17RA binding protein"

SEQ ID NO: 141 - protein, 5 aa, Artificial Sequence
  source: /note="Description of Artificial Sequence: sequence motif"
DYAMH

SEQ ID NO: 142 - protein, 17 aa, Artificial Sequence
  source: /note="Description of Artificial Sequence: sequence motif"
GISWNSGRIGYADSVKG

SEQ ID NO: 143 - protein, 17 aa, Artificial Sequence
  source: /note="Description of Artificial Sequence: sequence motif"
ESSLGYCSGGSCSSFDY

SEQ ID NO: 144 - protein, 126 aa, Artificial Sequence; identical to SEQ ID NO: 132
  source: /note="Description of Artificial Sequence: IL-17RA binding protein"

SEQ ID NO: 145 - protein, 5 aa, Artificial Sequence
  source: /note="Description of Artificial Sequence: sequence motif"
DYAMH

SEQ ID NO: 146 - protein, 17 aa, Artificial Sequence
  source: /note="Description of Artificial Sequence: sequence motif"
GISWNSGRIGYADSVKG

SEQ ID NO: 147 - protein, 17 aa, Artificial Sequence
  source: /note="Description of Artificial Sequence: sequence motif"
ESSLGYCSGGSCSSFDY

SEQ ID NO: 148 - protein, 126 aa, Artificial Sequence; identical to SEQ ID NO: 132
  source: /note="Description of Artificial Sequence: IL-17RA binding protein"

SEQ ID NO: 149 - protein, 5 aa, Artificial Sequence
  source: /note="Description of Artificial Sequence: sequence motif"
DYAMH

SEQ ID NO: 150 - protein, 17 aa, Artificial Sequence
  source: /note="Description of Artificial Sequence: sequence motif"
GISWNSGRIGYADSVKG

SEQ ID NO: 151 - protein, 17 aa, Artificial Sequence
  source: /note="Description of Artificial Sequence: sequence motif"
ESSLGYCSGGSCSSFDY

SEQ ID NO: 152 - protein, 126 aa, Artificial Sequence; identical to SEQ ID NO: 132
  source: /note="Description of Artificial Sequence: IL-17RA binding protein"

SEQ ID NO: 153 - protein, 5 aa, Artificial Sequence
  source: /note="Description of Artificial Sequence: sequence motif"
DYAMH

SEQ ID NO: 154 - protein, 17 aa, Artificial Sequence
  source: /note="Description of Artificial Sequence: sequence motif"
GISWNSGRMGYADSVKG

SEQ ID NO: 155 - protein, 17 aa, Artificial Sequence
  source: /note="Description of Artificial Sequence: sequence motif"
DSSLGYCSGGSCSHFDY

SEQ ID NO: 156 - protein, 126 aa, Artificial Sequence
  source: /note="Description of Artificial Sequence: IL-17RA binding protein"
QVQLVESGGGLVQPGRSLRLSCAASGFTFDDYAMHWVRQAPGKGLEWVSGISWNSGRMGYADSVKGRFTISRDNAKNSLYLQMNSLRAEDTALYYCAKDSSLGYCSGGSCSHFDYWGQGTLVTVSS

SEQ ID NO: 157 - protein, 5 aa, Artificial Sequence
  source: /note="Description of Artificial Sequence: sequence motif"
DYAMH

SEQ ID NO: 158 - protein, 17 aa, Artificial Sequence
  source: /note="Description of Artificial Sequence: sequence motif"
GISWNGGRKGYADSVKG

SEQ ID NO: 159 - protein, 17 aa, Artificial Sequence
  source: /note="Description of Artificial Sequence: sequence motif"
DSSLGYCSGGSCSSFDY

SEQ ID NO: 160 - protein, 126 aa, Artificial Sequence
  source: /note="Description of Artificial Sequence: IL-17RA binding protein"
QVQLVESGGGLVQPGGSLRLSCAASGFTFDDYAMHWVRQAPGKGLEWVSGISWNGGRKGYADSVKGRFTISRDNAKNSLYLQMNSLRAEDTALYYCAKDSSLGYCSGGSCSSFDYWGQGTLVTVSS

SEQ ID NO: 161 - protein, 5 aa, Artificial Sequence
  source: /note="Description of Artificial Sequence: sequence motif"
DYAMH

SEQ ID NO: 162 - protein, 17 aa, Artificial Sequence
  source: /note="Description of Artificial Sequence: sequence motif"
GISWNSGRKDYADSVKG

SEQ ID NO: 163 - protein, 17 aa, Artificial Sequence
  source: /note="Description of Artificial Sequence: sequence motif"
DSSIGYCSGGSCSYFDY

SEQ ID NO: 164 - protein, 126 aa, Artificial Sequence
  source: /note="Description of Artificial Sequence: IL-17RA binding protein"
QVQLVESGGGLVQPGRSLRLSCAASGFTFDDYAMHWVRQAPGKGLEWVSGISWNSGRKDYADSVKGRFTISRDNAKNSLYLQMNSLRAEDTALYYCAKDSSIGYCSGGSCSYFDYRGQGTLVTVSS

SEQ ID NO: 165 - protein, 5 aa, Artificial Sequence
  source: /note="Description of Artificial Sequence: sequence motif"
DYAMH

SEQ ID NO: 166 - protein, 17 aa, Artificial Sequence
  source: /note="Description of Artificial Sequence: sequence motif"
GISWNSGRKDYADSVKG

SEQ ID NO: 167 - protein, 17 aa, Artificial Sequence
  source: /note="Description of Artificial Sequence: sequence motif"
DSSLGYCSGGSCSYFDY

SEQ ID NO: 168 - protein, 126 aa, Artificial Sequence
  source: /note="Description of Artificial Sequence: IL-17RA binding protein"
QVQLVESGGGLVQPGRSLRLSCAASGFTFADYAMHWVRQAPGKGLEWVSGISWNSGRKDYADSVKGRFTISRDNAKNSLYLQMNSLRAEDTALYYCAKDSSLGYCSGGSCSYFDYRGQGTQVTVSS

SEQ ID NO: 169 - protein, 5 aa, Artificial Sequence
  source: /note="Description of Artificial Sequence: sequence motif"
DYAMH

SEQ ID NO: 170 - protein, 17 aa, Artificial Sequence
  source: /note="Description of Artificial Sequence: sequence motif"
GISWNSGRKDYADSVKG

SEQ ID NO: 171 - protein, 17 aa, Artificial Sequence
  source: /note="Description of Artificial Sequence: sequence motif"
DSSLGYCSGGSCSYFDY

SEQ ID NO: 172 - protein, 126 aa, Artificial Sequence; identical to SEQ ID NO: 168
  source: /note="Description of Artificial Sequence: IL-17RA binding protein"

SEQ ID NO: 173 - protein, 5 aa, Artificial Sequence
  source: /note="Description of Artificial Sequence: sequence motif"
DYAMH

SEQ ID NO: 174 - protein, 17 aa, Artificial Sequence
  source: /note="Description of Artificial Sequence: sequence motif"
GISWNSGRKDYADSVKG

SEQ ID NO: 175 - protein, 17 aa, Artificial Sequence
  source: /note="Description of Artificial Sequence: sequence motif"
DSSLGYCSGGSCSYFDY

SEQ ID NO: 176 - protein, 126 aa, Artificial Sequence; identical to SEQ ID NO: 168
  source: /note="Description of Artificial Sequence: IL-17RA binding protein"

SEQ ID NO: 177 - protein, 5 aa, Artificial Sequence
  source: /note="Description of Artificial Sequence: sequence motif"
DYAMH

SEQ ID NO: 178 - protein, 17 aa, Artificial Sequence
  source: /note="Description of Artificial Sequence: sequence motif"
GISWNSGRKDYADSVKG

SEQ ID NO: 179 - protein, 17 aa, Artificial Sequence
  source: /note="Description of Artificial Sequence: sequence motif"
DSSLGYCSGGSCSYFDY

SEQ ID NO: 180 - protein, 126 aa, Artificial Sequence; identical to SEQ ID NO: 168
  source: /note="Description of Artificial Sequence: IL-17RA binding protein"

SEQ ID NO: 181 - protein, 5 aa, Artificial Sequence
  source: /note="Description of Artificial Sequence: sequence motif"
DYAMH

SEQ ID NO: 182 - protein, 17 aa, Artificial Sequence
  source: /note="Description of Artificial Sequence: sequence motif"
GISWNSGRKDYADSVKG

SEQ ID NO: 183 - protein, 17 aa, Artificial Sequence
  source: /note="Description of Artificial Sequence: sequence motif"
DSSLGYCSGGSCSYFDY

SEQ ID NO: 184 - protein, 126 aa, Artificial Sequence; identical to SEQ ID NO: 168
  source: /note="Description of Artificial Sequence: IL-17RA binding protein"

SEQ ID NO: 185 - protein, 5 aa, Artificial Sequence
  source: /note="Description of Artificial Sequence: sequence motif"
DYAMH

SEQ ID NO: 186 - protein, 17 aa, Artificial Sequence
  source: /note="Description of Artificial Sequence: sequence motif"
GISWNSGRKDYADSVKG

SEQ ID NO: 187 - protein, 17 aa, Artificial Sequence
  source: /note="Description of Artificial Sequence: sequence motif"
DSSLGYCSGGSCSYFDY

SEQ ID NO: 188 - protein, 126 aa, Artificial Sequence
  source: /note="Description of Artificial Sequence: IL-17RA binding protein"
EVQLVESGGGLVQPGRSLRLSCAASGFTFADYAMHWVRQAPGKGLEWVSGISWNSGRKDYADSVKGRFTISRDNAKNSLYLQMNSLRAEDTALYYCAKDSSLGYCSGGSCSYFDYRGQGTQVTVSS

SEQ ID NO: 189 - protein, 5 aa, Artificial Sequence
  source: /note="Description of Artificial Sequence: sequence motif"
DYAMH

SEQ ID NO: 190 - protein, 17 aa, Artificial Sequence
  source: /note="Description of Artificial Sequence: sequence motif"
GISWNSGRKDYADSVKG

SEQ ID NO: 191 - protein, 17 aa, Artificial Sequence
  source: /note="Description of Artificial Sequence: sequence motif"
DSSLGYCSGGSCSYFDY

SEQ ID NO: 192 - protein, 126 aa, Artificial Sequence; identical to SEQ ID NO: 188
  source: /note="Description of Artificial Sequence: IL-17RA binding protein"

SEQ ID NO: 193 - protein, 5 aa, Artificial Sequence
  source: /note="Description of Artificial Sequence: sequence motif"
DYAMH

SEQ ID NO: 194 - protein, 17 aa, Artificial Sequence
  source: /note="Description of Artificial Sequence: sequence motif"
GISWNSGRKDYADSVKG

SEQ ID NO: 195 - protein, 17 aa, Artificial Sequence
  source: /note="Description of Artificial Sequence: sequence motif"
DSSLGYCSGGSCSYFDY

SEQ ID NO: 196 - protein, 126 aa, Artificial Sequence
  source: /note="Description of Artificial Sequence: IL-17RA binding protein"
EVQLVESGGGLVQPGGSLRLSCAASGFTFDDYAMHWVRQAPGKGLEWVSGISWNSGRKDYADSVKGRFTISRDNAKNSLYLQMNSLRAEDTALYYCAKDSSLGYCSGGSCSYFDYRGQGTQVTVSS

SEQ ID NO: 197 - protein, 5 aa, Artificial Sequence
  source: /note="Description of Artificial Sequence: sequence motif"
DYAMH

SEQ ID NO: 198 - protein, 17 aa, Artificial Sequence
  source: /note="Description of Artificial Sequence: sequence motif"
GISWNSGRRDYADSVKG

SEQ ID NO: 199 - protein, 17 aa, Artificial Sequence
  source: /note="Description of Artificial Sequence: sequence motif"
DSSLGYCSGGSCSYFDY

SEQ ID NO: 200 - protein, 126 aa, Artificial Sequence
  source: /note="Description of Artificial Sequence: IL-17RA binding protein"
EVQLVESGGGLVQPGRSLRLSCAASGFTFADYAMHWVRQAPGKGLEWVSGISWNSGRRDYADSVKGRFTISRDNAKNSLYLQMNSLRAEDTALYYCAKDSSLGYCSGGSCSYFDYRGQGTQVTVSS

SEQ ID NO: 201 - protein, 5 aa, Artificial Sequence
  source: /note="Description of Artificial Sequence: sequence motif"
DYAMH

SEQ ID NO: 202 - protein, 17 aa, Artificial Sequence
  source: /note="Description of Artificial Sequence: sequence motif"
GISWNGGRIDYADSVKG

SEQ ID NO: 203 - protein, 17 aa, Artificial Sequence
  source: /note="Description of Artificial Sequence: sequence motif"
DSSLGYCSGGSCSYFDY

SEQ ID NO: 204 - protein, 126 aa, Artificial Sequence
  source: /note="Description of Artificial Sequence: IL-17RA binding protein"
EVQLVESGGGLVQPGRSLRLSCAASGFTFADYAMHWVRQAPGKGLEWVSGISWNGGRIDYADSVKGRFTISRDNAKNSLYLQMNSLRAEDTALYYCAKDSSLGYCSGGSCSYFDYRGQGTQVTVSS

SEQ ID NO: 205 - protein, 5 aa, Artificial Sequence
  source: /note="Description of Artificial Sequence: sequence motif"
DYAMH

SEQ ID NO: 206 - protein, 17 aa, Artificial Sequence
  source: /note="Description of Artificial Sequence: sequence motif"
GISWNSGSIGYADSVKG

SEQ ID NO: 207 - protein, 17 aa, Artificial Sequence
  source: /note="Description of Artificial Sequence: sequence motif"
DSSLGYCSGGSCSYFDY

SEQ ID NO: 208 - protein, 126 aa, Artificial Sequence
  source: /note="Description of Artificial Sequence: IL-17RA binding protein"
QVQLVESGGGLVQPGGSLRLSCAASGFTFDDYAMHWVRQAPGKGLEWVSGISWNSGSIGYADSVKGRFTISRDNAKNSLYLQMNSLRAEDTALYYCAKDSSLGYCSGGSCSYFDYRGQGTQVTVSS

SEQ ID NO: 209 - protein, 5 aa, Artificial Sequence
  source: /note="Description of Artificial Sequence: sequence motif"
DYAMH

SEQ ID NO: 210 - protein, 17 aa, Artificial Sequence
  source: /note="Description of Artificial Sequence: sequence motif"
GISWNGGRIGYADSVKG

SEQ ID NO: 211 - protein, 17 aa, Artificial Sequence
  source: /note="Description of Artificial Sequence: sequence motif"
ESSLGYCSGGTCSSFDY

SEQ ID NO: 212 - protein, 126 aa, Artificial Sequence
  source: /note="Description of Artificial Sequence: IL-17RA binding protein"
EVQLVESGGGLVQPGGSLRLSCAASGFTFDDYAMHWVRQAPGKGLEWVSGISWNGGRIGYADSVKGRFTISRDNAKNSLYLQMNSLRAEDTALYYCAKESSLGYCSGGTCSSFDYRGQGTLVTVSS

SEQ ID NO: 213 - protein, 5 aa, Artificial Sequence
  source: /note="Description of Artificial Sequence: sequence motif"
EYAMH

SEQ ID NO: 214 - protein, 17 aa, Artificial Sequence
  source: /note="Description of Artificial Sequence: sequence motif"
GISWNGGRIDYADSVKG

SEQ ID NO: 215 - protein, 17 aa, Artificial Sequence
  source: /note="Description of Artificial Sequence: sequence motif"
DSSLGYCSGGSCSSFDY

SEQ ID NO: 216 - protein, 126 aa, Artificial Sequence
  source: /note="Description of Artificial Sequence: IL-17RA binding protein"
EVQLVESGGGLVQPGRSLRLSCAASGFTFDEYAMHWVRQAPGKGLEWVSGISWNGGRIDYADSVKGRFTISRDNAKNSLYLQMNSLRPEDTALYYCAKDSSLGYCSGGSCSSFDYWGQGTLVTVSS

SEQ ID NO: 217 - protein, 5 aa, Artificial Sequence
  source: /note="Description of Artificial Sequence: sequence motif"
EYAMH

SEQ ID NO: 218 - protein, 17 aa, Artificial Sequence
  source: /note="Description of Artificial Sequence: sequence motif"
GISWNGGRIDYADSVKG

SEQ ID NO: 219 - protein, 17 aa, Artificial Sequence
  source: /note="Description of Artificial Sequence: sequence motif"
DSSLGYCSGGSCSSFDY

SEQ ID NO: 220 - protein, 126 aa, Artificial Sequence
  source: /note="Description of Artificial Sequence: IL-17RA binding protein"
QVQLVESGGGLVQPGRSLRLSCAASGFTFDEYAMHWVRQAPGKGLEWVSGISWNGGRIDYADSVKGRFTISRDNAKNSLYLQMNSLRPEDTALYYCAKDSSLGYCSGGSCSSFDYWGQGTLVTVSS

SEQ ID NO: 221 - protein, 5 aa, Artificial Sequence
  source: /note="Description of Artificial Sequence: sequence motif"
DYAMH

SEQ ID NO: 222 - protein, 17 aa, Artificial Sequence
  source: /note="Description of Artificial Sequence: sequence motif"
GISWNSGSIGYADSVKG

SEQ ID NO: 223 - protein, 17 aa, Artificial Sequence
  source: /note="Description of Artificial Sequence: sequence motif"
EEGLGYCSGGSCSTFDY

SEQ ID NO: 224 - protein, 126 aa, Artificial Sequence
  source: /note="Description of Artificial Sequence: IL-17RA binding protein"
EVQLVESGGGLVQPGRSLRLSCAASGFTFDDYAMHWVRQAPGKGLEWVSGISWNSGSIGYADSVKGRFTISRDNAKNSLYLQMNSLRAEDTALYYCAKEEGLGYCSGGSCSTFDYRGQGTLVTVSS

SEQ ID NO: 225 - protein, 5 aa, Artificial Sequence
  source: /note="Description of Artificial Sequence: sequence motif"
DYAMH

SEQ ID NO: 226 - protein, 17 aa, Artificial Sequence
  source: /note="Description of Artificial Sequence: sequence motif"
GISWNSGRTGYADSVKG

SEQ ID NO: 227 - protein, 17 aa, Artificial Sequence
  source: /note="Description of Artificial Sequence: sequence motif"
DRGLGYCSGGSCSSFDY

SEQ ID NO: 228 - protein, 126 aa, Artificial Sequence
  source: /note="Description of Artificial Sequence: IL-17RA binding protein"
QVQLVESGGGLVQPGRSLRLSCAASGFTFDDYAMHWVRQAPGKGLEWVSGISWNSGRTGYADSVKGRFTISRDNAKNSLYLQMNSLRVEDTAMYYCAKDRGLGYCSGGSCSSFDYWGQGTLVTVSS

SEQ ID NO: 229 - protein, 5 aa, Artificial Sequence
  source: /note="Description of Artificial Sequence: sequence motif"
DYAMH

SEQ ID NO: 230 - protein, 17 aa, Artificial Sequence
  source: /note="Description of Artificial Sequence: sequence motif"
GISWNSGRRGYADSVKG

SEQ ID NO: 231 - protein, 17 aa, Artificial Sequence
  source: /note="Description of Artificial Sequence: sequence motif"
DRGLGYCSGGSCSSFDY

SEQ ID NO: 232 - protein, 126 aa, Artificial Sequence
  source: /note="Description of Artificial Sequence: IL-17RA binding protein"
EVQLVESGGGLVQPGRSLRLSCAASGFTFDDYAMHWVRQAPGKGLEWVSGISWNSGRRGYADSVKGRFTISRDNAKNSLYLQMNSLRVEDTALYYCAKDRGLGYCSGGSCSSFDYWGQGTLVTVSS

SEQ ID NO: 233 - protein, 5 aa, Artificial Sequence
  source: /note="Description of Artificial Sequence: sequence motif"
DYAMH

SEQ ID NO: 234 - protein, 17 aa, Artificial Sequence
  source: /note="Description of Artificial Sequence: sequence motif"
GISWNSGRKDYADSVKG

SEQ ID NO: 235 - protein, 17 aa, Artificial Sequence
  source: /note="Description of Artificial Sequence: sequence motif"
DRGLGYCSGGSCSYFDY

SEQ ID NO: 236 - protein, 126 aa, Artificial Sequence
  source: /note="Description of Artificial Sequence: IL-17RA binding protein"
EVQLVESGGGLVQPGRSLRLSCAASGFTFDDYAMHWVRQAPGKGLEWVSGISWNSGRKDYADSVKGRFTISRDNAKNSLYLQMNSLRVEDTALYYCAKDRGLGYCSGGSCSYFDYWGQGTLVTVSS

SEQ ID NO: 237 - protein, 5 aa, Artificial Sequence
  source: /note="Description of Artificial Sequence: sequence motif"
DYAMH

SEQ ID NO: 238 - protein, 17 aa, Artificial Sequence
  source: /note="Description of Artificial Sequence: sequence motif"
GISWNSGRTDYADSVKG

SEQ ID NO: 239 - protein, 17 aa, Artificial Sequence
  source: /note="Description of Artificial Sequence: sequence motif"
DPALGYCSGGSCSHFDY

SEQ ID NO: 240 - protein, 126 aa, Artificial Sequence
  source: /note="Description of Artificial Sequence: IL-17RA binding protein"
QVRLVESGGGLVQPGKSLRLSCAASGFTFDDYAMHWVRQAPGKGLEWVSGISWNSGRTDYADSVKGRFTISRDNAKNSLYLQMNSLRAEDTALYYCAKDPALGYCSGGSCSHFDYWGQGTLVTVSS

SEQ ID NO: 241 - protein, 5 aa, Artificial Sequence
  source: /note="Description of Artificial Sequence: sequence motif"
DYAMH

SEQ ID NO: 242 - protein, 17 aa, Artificial Sequence
  source: /note="Description of Artificial Sequence: sequence motif"
GISWNSGRTDYADSVKG

SEQ ID NO: 243 - protein, 17 aa, Artificial Sequence
  source: /note="Description of Artificial Sequence: sequence motif"
DPSLGYCSGGSCSHFDY

SEQ ID NO: 244 - protein, 126 aa, Artificial Sequence
  source: /note="Description of Artificial Sequence: IL-17RA binding protein"
EVQLVESGGGLVQPGRSLRLSCAASGFTFDDYAMHWVRQAPGKGLEWVSGISWNSGRTDYADSVKGRFTISRDNAKNSLYLQMNSLRAEDTALYYCAKDPSLGYCSGGSCSHFDYWGQGTLVTVSS

SEQ ID NO: 245 - protein, 5 aa, Artificial Sequence
  source: /note="Description of Artificial Sequence: sequence motif"
DYAMH

SEQ ID NO: 246 - protein, 17 aa, Artificial Sequence
  source: /note="Description of Artificial Sequence: sequence motif"
GISWNSGRIDYADSVKG

SEQ ID NO: 247 - protein, 17 aa, Artificial Sequence
  source: /note="Description of Artificial Sequence: sequence motif"
DRGLGYCSGGSCSYFDY

SEQ ID NO: 248 - protein, 126 aa, Artificial Sequence
  source: /note="Description of Artificial Sequence: IL-17RA binding protein"
QVQLVESGGGLVQPGRSLRLSCAASGFTFDDYAMHWVRQAPGKGLEWVSGISWNSGRIDYADSVKGRFTISRDNAKNSLYLQMNSLRAEDTALYYCAKDRGLGYCSGGSCSYFDYWGQGTLVTVSS

SEQ ID NO: 249 - protein, 5 aa, Artificial Sequence
  source: /note="Description of Artificial Sequence: sequence motif"
DYAMH

SEQ ID NO: 250 - protein, 17 aa, Artificial Sequence
  source: /note="Description of Artificial Sequence: sequence motif"
GISWNSGRIDYADSVKG

SEQ ID NO: 251 - protein, 17 aa, Artificial Sequence
  source: /note="Description of Artificial Sequence: sequence motif"
DRGLGYCSGGSCSYFDY

SEQ ID NO: 252 - protein, 126 aa, Artificial Sequence
  source: /note="Description of Artificial Sequence: IL-17RA binding protein"
DVQLVESGGGLVQPGRSLRLSCAASGFTFDDYAMHWVRQAPGKGLEWVSGISWNSGRIDYADSVKGRFTISRDNAKNSLYLQMNSLRAEDTALYYCAKDRGLGYCSGGSCSYFDYWGQGTLVTVSS

SEQ ID NO: 253 - protein, 5 aa, Artificial Sequence
  source: /note="Description of Artificial Sequence: sequence motif"
DYAMH

SEQ ID NO: 254 - protein, 17 aa, Artificial Sequence
  source: /note="Description of Artificial Sequence: sequence motif"
GISWNSGRIDYADSVKG

SEQ ID NO: 255 - protein, 17 aa, Artificial Sequence
  source: /note="Description of Artificial Sequence: sequence motif"
ERGLGYCSGGSCSSLDY

SEQ ID NO: 256 - protein, 126 aa, Artificial Sequence
  source: /note="Description of Artificial Sequence: IL-17RA binding protein"
QVQLVESGGGLVQPGGSLRLSCAASGFTFDDYAMHWVRQAPGKGLEWVSGISWNSGRIDYADSVKGRFTISRDNAKNSLYLQMNSLRAEDTALYYCAKERGLGYCSGGSCSSLDYWGQGTLVTVSS

SEQ ID NO: 257 - protein, 5 aa, Artificial Sequence
  source: /note="Description of Artificial Sequence: sequence motif"
DYAMH

SEQ ID NO: 258 - protein, 17 aa, Artificial Sequence
  source: /note="Description of Artificial Sequence: sequence motif"
GISWNGNRRDYADSVKG

SEQ ID NO: 259 - protein, 17 aa, Artificial Sequence
  source: /note="Description of Artificial Sequence: sequence motif"
DSSLGYCSGGSCSNFDY

SEQ ID NO: 260 - protein, 126 aa, Artificial Sequence
  source: /note="Description of Artificial Sequence: IL-17RA binding protein"
QVQLVESGGGLVQPGRSLRLSCAASGFTFDDYAMHWVRQGPGKGLEWVSGISWNGNRRDYADSVKGRFTISRDNAKNSLYLQMNSLRAEDTAVYYCAKDSSLGYCSGGSCSNFDYWGQGTLVTVSS

SEQ ID NO: 261 - protein, 5 aa, Artificial Sequence
  source: /note="Description of Artificial Sequence: sequence motif"
DYAMH

SEQ ID NO: 262 - protein, 17 aa, Artificial Sequence
  source: /note="Description of Artificial Sequence: sequence motif"
GISWNGNRRDYADSVKG

SEQ ID NO: 263 - protein, 17 aa, Artificial Sequence
  source: /note="Description of Artificial Sequence: sequence motif"
DSSLGYCSGGSCSNFDY

SEQ ID NO: 264 - protein, 126 aa, Artificial Sequence; identical to SEQ ID NO: 260
  source: /note="Description of Artificial Sequence: IL-17RA binding protein"

SEQ ID NO: 265 - protein, 5 aa, Artificial Sequence
  source: /note="Description of Artificial Sequence: sequence motif"
DYAMH

SEQ ID NO: 266 - protein, 17 aa, Artificial Sequence
  source: /note="Description of Artificial Sequence: sequence motif"
GISWNGNRRDYADSVKG

SEQ ID NO: 267 - protein, 17 aa, Artificial Sequence
  source: /note="Description of Artificial Sequence: sequence motif"
DSSLGYCSGGSCSNFDY

SEQ ID NO: 268 - protein, 126 aa, Artificial Sequence; identical to SEQ ID NO: 260
  source: /note="Description of Artificial Sequence: IL-17RA binding protein"

SEQ ID NO: 269 - protein, 5 aa, Artificial Sequence
  source: /note="Description of Artificial Sequence: sequence motif"
DYAMH

SEQ ID NO: 270 - protein, 17 aa, Artificial Sequence
  source: /note="Description of Artificial Sequence: sequence motif"
GISWNGGRRDYADSVKG

SEQ ID NO: 271 - protein, 17 aa, Artificial Sequence
  source: /note="Description of Artificial Sequence: sequence motif"
DSSLGYCSGGSCSNFDY

SEQ ID NO: 272 - protein, 126 aa, Artificial Sequence
  source: /note="Description of Artificial Sequence: IL-17RA binding protein"
QVQLVESGGGLVQPGRSLRLSCAASGFTFDDYAMHWVRQAPGKGLEWVSGISWNGGRRDYADSVKGRFTISRDNAKNSLYLQMNSLRAEDTAVYYCAKDSSLGYCSGGSCSNFDYWGQGTLVTVSS

SEQ ID NO: 273 - protein, 5 aa, Artificial Sequence
  source: /note="Description of Artificial Sequence: sequence motif"
DYAMH

SEQ ID NO: 274 - protein, 17 aa, Artificial Sequence
  source: /note="Description of Artificial Sequence: sequence motif"
GISWNGNRRDYADPVKG

SEQ ID NO: 275 - protein, 17 aa, Artificial Sequence
  source: /note="Description of Artificial Sequence: sequence motif"
DSSLGYCSGGSCSNFDY

SEQ ID NO: 276 - protein, 126 aa, Artificial Sequence
  source: /note="Description of Artificial Sequence: IL-17RA binding protein"
QVQLVESGGGLVQPGRSLRLSCAASGFTFDDYAMHWVRQGPGKGLEWVSGISWNGNRRDYADPVKGRFTISRDNAKNSLYLQMNSLRAEDTAVYYCAKDSSLGYCSGGSCSNFDYWGQGTLVTVSS

SEQ ID NO: 277 - protein, 5 aa, Artificial Sequence
  source: /note="Description of Artificial Sequence: sequence motif"
DYAMH

SEQ ID NO: 278 - protein, 17 aa, Artificial Sequence
  source: /note="Description of Artificial Sequence: sequence motif"
GISWNGNRRDYADSVKG

SEQ ID NO: 279 - protein, 17 aa, Artificial Sequence
  source: /note="Description of Artificial Sequence: sequence motif"
DSSLGYCSGGSCSNFDY

SEQ ID NO: 280 - protein, 126 aa, Artificial Sequence
  source: /note="Description of Artificial Sequence: IL-17RA binding protein"
EVQLVESGGGLVQPGRSLRLSCAASGFTFDDYAMHWVRQGPGKGLEWVSGISWNGNRRDYADSVKGRFTISRDNAKNSLYLQMNSLRAEDTAVYYCAKDSSLGYCSGGSCSNFDYWGQGTLVTVSS

SEQ ID NO: 281 - protein, 5 aa, Artificial Sequence
  source: /note="Description of Artificial Sequence: sequence motif"
DYAMH

SEQ ID NO: 282 - protein, 17 aa, Artificial Sequence
  source: /note="Description of Artificial Sequence: sequence motif"
GISWNGNRRDYADSVKG

SEQ ID NO: 283 - protein, 17 aa, Artificial Sequence
  source: /note="Description of Artificial Sequence: sequence motif"
DSSLGYCSGGSCSNFDY

SEQ ID NO: 284 - protein, 126 aa, Artificial Sequence; identical to SEQ ID NO: 280
  source: /note="Description of Artificial Sequence: IL-17RA binding protein"

SEQ ID NO: 285 - protein, 5 aa, Artificial Sequence
  source: /note="Description of Artificial Sequence: sequence motif"
DYAMH

SEQ ID NO: 286 - protein, 17 aa, Artificial Sequence
  source: /note="Description of Artificial Sequence: sequence motif"
GISWNGNRRDYADSVKG

SEQ ID NO: 287 - protein, 17 aa, Artificial Sequence
  source: /note="Description of Artificial Sequence: sequence motif"
DSSLGYCSGGSCSNFDY

SEQ ID NO: 288 - protein, 126 aa, Artificial Sequence; identical to SEQ ID NO: 280
  source: /note="Description of Artificial Sequence: IL-17RA binding protein"

SEQ ID NO: 289 - protein, 5 aa, Artificial Sequence
  source: /note="Description of Artificial Sequence: sequence motif"
DYAMH

SEQ ID NO: 290 - protein, 17 aa, Artificial Sequence
  source: /note="Description of Artificial Sequence: sequence motif"
GISWNGGRRDYADSVKG

SEQ ID NO: 291 - protein, 17 aa, Artificial Sequence
  source: /note="Description of Artificial Sequence: sequence motif"
DSSLGYCSGGSCSNFDY

SEQ ID NO: 292 - protein, 126 aa, Artificial Sequence
  source: /note="Description of Artificial Sequence: IL-17RA binding protein"
QVQLVESGGGLVQPGRSLRLSCAASGLTFDDYAMHWVRQAPGKGLEWVSGISWNGGRRDYADSVKGRFTISRDNAKNSLYLQMNSLRAEDTAVYYCAKDSSLGYCSGGSCSNFDYWGQGTLVTVSS

SEQ ID NO: 293 - protein, 5 aa, Artificial Sequence
  source: /note="Description of Artificial Sequence: sequence motif"
DYAMH

SEQ ID NO: 294 - protein, 17 aa, Artificial Sequence
  source: /note="Description of Artificial Sequence: sequence motif"
GISWNGGRRDYADSVKG

SEQ ID NO: 295 - protein, 17 aa, Artificial Sequence
  source: /note="Description of Artificial Sequence: sequence motif"
DSSLGYCSGGSCSNFDY

SEQ ID NO: 296 - protein, 126 aa, Artificial Sequence
  source: /note="Description of Artificial Sequence: IL-17RA binding protein"
EVQLVESGGGLVQPGRSLRLSCAASGFTFDDYAMHWVRQAPGKGLEWVSGISWNGGRRDYADSVKGRFTISRDNAKNSLYLQMNSLRAEDTAVYYCAKDSSLGYCSGGSCSNFDYWGQGTLVTVSS

SEQ ID NO: 297 - protein, 5 aa, Artificial Sequence
  source: /note="Description of Artificial Sequence: sequence motif"
DYAMH

SEQ ID NO: 298 - protein, 17 aa, Artificial Sequence
  source: /note="Description of Artificial Sequence: sequence motif"
GISWNGNRRDYADSVKG

SEQ ID NO: 299 - protein, 17 aa, Artificial Sequence
  source: /note="Description of Artificial Sequence: sequence motif"
DSSLGYCSGGSCSNFDY

SEQ ID NO: 300 - protein, 126 aa, Artificial Sequence
  source: /note="Description of Artificial Sequence: IL-17RA binding protein"
EVQLVESGGGLVQPGRSLRLSCAASGFTFDDYAMHWVRQGPGKGLEWVSGISWNGNRRDYADSVKGRFTISRDNAKNSLYLQMNSLRAEDTAVYYCAKDSSLGYCSGGSCSNFDYWGQGTRVTVSS

SEQ ID NO: 301 - protein, 5 aa, Artificial Sequence
  source: /note="Description of Artificial Sequence: sequence motif"
DYAMH

SEQ ID NO: 302 - protein, 17 aa, Artificial Sequence
  source: /note="Description of Artificial Sequence: sequence motif"
GISWNGNRRDYADSVKG

SEQ ID NO: 303 - protein, 17 aa, Artificial Sequence
  source: /note="Description of Artificial Sequence: sequence motif"
DSSLGYCSGGSCSNFDY

SEQ ID NO: 304 - protein, 126 aa, Artificial Sequence
  source: /note="Description of Artificial Sequence: IL-17RA binding protein"
EVQLVESGGGLVQPGRSLRLSCAASGFTFDDYAMHWVRQGPGKGLEWVSGISWNGNRRDYADSVKGRFTISRDNAKNSLYLQINSLRAEDTAVYYCAKDSSLGYCSGGSCSNFDYWGQGTLVTVSS

SEQ ID NO: 305 - protein, 5 aa, Artificial Sequence
  source: /note="Description of Artificial Sequence: sequence motif"
DNAMH

SEQ ID NO: 306 - protein, 17 aa, Artificial Sequence
  source: /note="Description of Artificial Sequence: sequence motif"
GISWNGGRRDYADSVKG

SEQ ID NO: 307 - protein, 17 aa, Artificial Sequence
  source: /note="Description of Artificial Sequence: sequence motif"
DSSLGYCSGGSCSKFDY

SEQ ID NO: 308 - protein, 126 aa, Artificial Sequence
  source: /note="Description of Artificial Sequence: IL-17RA binding protein"
EVQLVESGGGLVQPGRSLRLSCAASGFTFDDNAMHWVRQAPGKGLEWVSGISWNGGRRDYADSVKGRFTISRDNAKNSLYLQMNSLRVEDTAVYYCAKDSSLGYCSGGSCSKFDYWGQGTLVTVSS

SEQ ID NO: 309 - protein, 5 aa, Artificial Sequence
  source: /note="Description of Artificial Sequence: sequence motif"
DNAMH

SEQ ID NO: 310 - protein, 17 aa, Artificial Sequence
  source: /note="Description of Artificial Sequence: sequence motif"
GISWNGGRRDYADSVKG

SEQ ID NO: 311 - protein, 17 aa, Artificial Sequence
  source: /note="Description of Artificial Sequence: sequence motif"
DSSLGYCSGGSCSKFDY

SEQ ID NO: 312 - protein, 126 aa, Artificial Sequence; identical to SEQ ID NO: 308
  source: /note="Description of Artificial Sequence: IL-17RA binding protein"

SEQ ID NO: 313 - protein, 5 aa, Artificial Sequence
  source: /note="Description of Artificial Sequence: sequence motif"
DNAMH

SEQ ID NO: 314 - protein, 17 aa, Artificial Sequence
  source: /note="Description of Artificial Sequence: sequence motif"
GISWNGGRRDYADSVKG

SEQ ID NO: 315 - protein, 17 aa, Artificial Sequence
  source: /note="Description of Artificial Sequence: sequence motif"
DSSLGYCSGGSCSNFDY

SEQ ID NO: 316 - protein, 126 aa, Artificial Sequence
  source: /note="Description of Artificial Sequence: IL-17RA binding protein"
EVQLVESGGGLVQPGRSLRLSCAASGFTFDDNAMHWVRQAPGKGLEWVSGISWNGGRRDYADSVKGRFTISRDNAKNSLYLQMNSLRVEDTAVYYCAKDSSLGYCSGGSCSNFDYWGQGTLVTVSS

SEQ ID NO: 317 - protein, 5 aa, Artificial Sequence
  source: /note="Description of Artificial Sequence: sequence motif"
DNAMH

SEQ ID NO: 318 - protein, 17 aa, Artificial Sequence
  source: /note="Description of Artificial Sequence: sequence motif"
GISWNGGRRDYADSVKG

SEQ ID NO: 319 - protein, 17 aa, Artificial Sequence
  source: /note="Description of Artificial Sequence: sequence motif"
DSSLGYCSGGSCSNFDY

SEQ ID NO: 320 - protein, 126 aa, Artificial Sequence; identical to SEQ ID NO: 316
  source: /note="Description of Artificial Sequence: IL-17RA binding protein"

SEQ ID NO: 321 - protein, 5 aa, Artificial Sequence
  source: /note="Description of Artificial Sequence: sequence motif"
DNAMH

SEQ ID NO: 322 - protein, 17 aa, Artificial Sequence
  source: /note="Description of Artificial Sequence: sequence motif"
GISWNGGRRDYADSVKG

SEQ ID NO: 323 - protein, 17 aa, Artificial Sequence
  source: /note="Description of Artificial Sequence: sequence motif"
DSSLGYCSGGSCSKFDY

SEQ ID NO: 324 - protein, 126 aa, Artificial Sequence
  source: /note="Description of Artificial Sequence: IL-17RA binding protein"
QVQLVESGGGLVQPGRSLRLSCAASGFTFDDNAMHWVRQAPGKGLEWVSGISWNGGRRDYADSVKGRFTISRDNAKNSLYLQMNSLRVEDTAVYYCAKDSSLGYCSGGSCSKFDYWGQGTLVTVSS

SEQ ID NO: 325 - protein, 5 aa, Artificial Sequence
  source: /note="Description of Artificial Sequence: sequence motif"
DNAMH

SEQ ID NO: 326 - protein, 17 aa, Artificial Sequence
  source: /note="Description of Artificial Sequence: sequence motif"
GISWNGGRRDYADSVKG

SEQ ID NO: 327 - protein, 17 aa, Artificial Sequence
  source: /note="Description of Artificial Sequence: sequence motif"
DSSLGYCSGGSCSKFDY

SEQ ID NO: 328 - protein, 126 aa, Artificial Sequence; identical to SEQ ID NO: 324
  source: /note="Description of Artificial Sequence: IL-17RA binding protein"

SEQ ID NO: 329 - protein, 5 aa, Artificial Sequence
  source: /note="Description of Artificial Sequence: sequence motif"
DNAMH

SEQ ID NO: 330 - protein, 17 aa, Artificial Sequence
  source: /note="Description of Artificial Sequence: sequence motif"
GISWNGGRRDYADSVKG

SEQ ID NO: 331 - protein, 17 aa, Artificial Sequence
  source: /note="Description of Artificial Sequence: sequence motif"
DSSLGYCSGGSCSNFDY

SEQ ID NO: 332 - protein, 126 aa, Artificial Sequence
  source: /note="Description of Artificial Sequence: IL-17RA binding protein"
QGQLVESGGGLVQPGRSLRLSCAASGFTFDDNAMHWVRQAPGKGLEWVSGISWNGGRRDYADSVKGRFTISRDNAKNSLYLQMNSLRVEDTAVYYCAKDSSLGYCSGGSCSNFDYWGQGTLVTVSS

SEQ ID NO: 333 - protein, 5 aa, Artificial Sequence
  source: /note="Description of Artificial Sequence: sequence motif"
DNAMH

SEQ ID NO: 334 - protein, 17 aa, Artificial Sequence
  source: /note="Description of Artificial Sequence: sequence motif"
GISWNGGRRDYADSVKG

SEQ ID NO: 335 - protein, 17 aa, Artificial Sequence
  source: /note="Description of Artificial Sequence: sequence motif"
DSSLGYCSGGSCSNFDY

SEQ ID NO: 336 - protein, 126 aa, Artificial Sequence
  source: /note="Description of Artificial Sequence: IL-17RA binding protein"
QVQLVESGGGLVQPGRSLRLSCAASGFTFDDNAMHWVRQAPGKGLEWVSGISWNGGRRDYADSVKGRFTISRDNAKNSLYLQMNSLRVEDTAVYYCAKDSSLGYCSGGSCSNFDYWGQGTLVTVSS

SEQ ID NO: 337 - protein, 5 aa, Artificial Sequence
  source: /note="Description of Artificial Sequence: sequence motif"
DNAMH

SEQ ID NO: 338 - protein, 17 aa, Artificial Sequence
  source: /note="Description of Artificial Sequence: sequence motif"
GISWNGGRRDYADSVKG

SEQ ID NO: 339 - protein, 17 aa, Artificial Sequence
  source: /note="Description of Artificial Sequence: sequence motif"
DSSLGYCSGGSCSNFDY

SEQ ID NO: 340 - protein, 126 aa, Artificial Sequence; identical to SEQ ID NO: 336
  source: /note="Description of Artificial Sequence: IL-17RA binding protein"

SEQ ID NO: 341 - protein, 5 aa, Artificial Sequence
  source: /note="Description of Artificial Sequence: sequence motif"
DYAMH

SEQ ID NO: 342 - protein, 17 aa, Artificial Sequence
  source: /note="Description of Artificial Sequence: sequence motif"
GISWNGNRRDYADSVKG

SEQ ID NO: 343 - protein, 17 aa, Artificial Sequence
  source: /note="Description of Artificial Sequence: sequence motif"
DSSLGYCSGGSCSNFDY

SEQ ID NO: 344 - protein, 126 aa, Artificial Sequence
  source: /note="Description of Artificial Sequence: IL-17RA binding protein"
EVQLVESGGGLVKPGGSLRLSCAASGFTFDDYAMHWVRQGPGKGLEWVSGISWNGNRRDYADSVKGRFTISRDNAKNSLYLQMNSLRAEDTAVYYCAKDSSLGYCSGGSCSNFDYWGQGTLVTVSS

SEQ ID NO: 345 - protein, 5 aa, Artificial Sequence
  source: /note="Description of Artificial Sequence: sequence motif"
DYAMH

SEQ ID NO: 346 - protein, 17 aa, Artificial Sequence
  source: /note="Description of Artificial Sequence: sequence motif"
GISWNGNRRDYADSVKG

SEQ ID NO: 347 - protein, 17 aa, Artificial Sequence
  source: /note="Description of Artificial Sequence: sequence motif"
DSSLGYCSGGSCSNFDY

SEQ ID NO: 348 - protein, 126 aa, Artificial Sequence; identical to SEQ ID NO: 344
  source: /note="Description of Artificial Sequence: IL-17RA binding protein"

SEQ ID NO: 349 - protein, 5 aa, Artificial Sequence
  source: /note="Description of Artificial Sequence: sequence motif"
DYAMH

SEQ ID NO: 350 - protein, 17 aa, Artificial Sequence
  source: /note="Description of Artificial Sequence: sequence motif"
GISWNGGRRDYADSVKG

SEQ ID NO: 351 - protein, 17 aa, Artificial Sequence
  source: /note="Description of Artificial Sequence: sequence motif"
DSSLGYCSGGSCSNFDY

SEQ ID NO: 352 - protein, 126 aa, Artificial Sequence
  source: /note="Description of Artificial Sequence: IL-17RA binding protein"
EVQLVESGGGLVKPGGSLRLSCAASGFTFDDYAMHWVRQAPGKGLEWVSGISWNGGRRDYADSVKGRFTISRDNAKNSLYLQMNSLRAEDTAVYYCAKDSSLGYCSGGSCSNFDYWGQGTLVTVSS

SEQ ID NO: 353 - protein, 5 aa, Artificial Sequence
  source: /note="Description of Artificial Sequence: sequence motif"
DYAMH

SEQ ID NO: 354 - protein, 17 aa, Artificial Sequence
  source: /note="Description of Artificial Sequence: sequence motif"
GISWNSGRIDYADSVKG

SEQ ID NO: 355 - protein, 17 aa, Artificial Sequence
  source: /note="Description of Artificial Sequence: sequence motif"
DSSLGYCSGGSCSYFDY

SEQ ID NO: 356 - protein, 126 aa, Artificial Sequence
  source: /note="Description of Artificial Sequence: IL-17RA binding protein"
QVQLVESGGGLVQPGRSLRLSCAASGFTFADYAMHWVRQVPGKGPEWVSGISWNSGRIDYADSVKGRFTISRDNAKNSLYLQMNSLRVEDTALYYCAKDSSLGYCSGGSCSYFDYRGQGTQVTVSS

SEQ ID NO: 357 - protein, 5 aa, Artificial Sequence
  source: /note="Description of Artificial Sequence: sequence motif"
DYAMH

SEQ ID NO: 358 - protein, 17 aa, Artificial Sequence
  source: /note="Description of Artificial Sequence: sequence motif"
GISWNSGRIDYADSVKG

SEQ ID NO: 359 - protein, 17 aa, Artificial Sequence
  source: /note="Description of Artificial Sequence: sequence motif"
DSSLGYCSGGSCSYFDY

SEQ ID NO: 360 - protein, 126 aa, Artificial Sequence
  source: /note="Description of Artificial Sequence: IL-17RA binding protein"
KVQLVESGGGLVQPGRSLRLSCAASGFTFADYAMHWVRQAPGKGLEWVSGISWNSGRIDYADSVKGRFTISRDNAKSSLYLQMNSLRPEDTALYFCAKDSSLGYCSGGSCSYFDYRGQGTQVTVSS

SEQ ID NO: 361 - protein, 5 aa, Artificial Sequence
  source: /note="Description of Artificial Sequence: sequence motif"
DYAMH

SEQ ID NO: 362 - protein, 17 aa, Artificial Sequence
  source: /note="Description of Artificial Sequence: sequence motif"
GISWNSGRIDYADSVKG

SEQ ID NO: 363 - protein, 17 aa, Artificial Sequence
  source: /note="Description of Artificial Sequence: sequence motif"
DSSLGYCSGGSCSYFDY

SEQ ID NO: 364 - protein, 126 aa, Artificial Sequence; identical to SEQ ID NO: 360
  source: /note="Description of Artificial Sequence: IL-17RA binding protein"

SEQ ID NO: 365 - protein, 5 aa, Artificial Sequence
  source: /note="Description of Artificial Sequence: sequence motif"
DYAMH

SEQ ID NO: 366 - protein, 17 aa, Artificial Sequence
  source: /note="Description of Artificial Sequence: sequence motif"
GISWNSGRIDYADSVKG

SEQ ID NO: 367 - protein, 17 aa, Artificial Sequence
  source: /note="Description of Artificial Sequence: sequence motif"
DSSLGYCSGGSCSYFDY

SEQ ID NO: 368 - protein, 126 aa, Artificial Sequence
  source: /note="Description of Artificial Sequence: IL-17RA binding protein"
EVQLVESGGGLVQPGRSLRLSCAASGFTFADYAMHWVRQTPGKGLEWVSGISWNSGRIDYADSVKGRFTISRDNAKSSLYLQMNSLRPEDTALYFCAKDSSLGYCSGGSCSYFDYRGQGTQVTVSS

SEQ ID NO: 369 - protein, 5 aa, Artificial Sequence
  source: /note="Description of Artificial Sequence: sequence motif"
DYAMH

SEQ ID NO: 370 - protein, 17 aa, Artificial Sequence
  source: /note="Description of Artificial Sequence: sequence motif"
GISWNSGRMDYADSVKG

SEQ ID NO: 371 - protein, 17 aa, Artificial Sequence
  source: /note="Description of Artificial Sequence: sequence motif"
DPSLGYCRGGSCSHFDY

SEQ ID NO: 372 - protein, 126 aa, Artificial Sequence
  source: /note="Description of Artificial Sequence: IL-17RA binding protein"
QVQLVESGGGLVQPGGSLRLSCAASGFTFDDYAMHWVRQAPGKGLEWVSGISWNSGRMDYADSVKGRFTISRDNAKNSLYLQMNSLRAEDTALYYCAKDPSLGYCRGGSCSHFDYWGQGTLVTVSS

SEQ ID NO: 373 - protein, 5 aa, Artificial Sequence
  source: /note="Description of Artificial Sequence: sequence motif"
DYAMH

SEQ ID NO: 374 - protein, 17 aa, Artificial Sequence
  source: /note="Description of Artificial Sequence: sequence motif"
GISWNSGRMDYADSVKG

SEQ ID NO: 375 - protein, 17 aa, Artificial Sequence
  source: /note="Description of Artificial Sequence: sequence motif"
DPSLGYCRGGSCSHFDY

SEQ ID NO: 376 - protein, 126 aa, Artificial Sequence; identical to SEQ ID NO: 372
  source: /note="Description of Artificial Sequence: IL-17RA binding protein"

SEQ ID NO: 377 - protein, 5 aa, Artificial Sequence
  source: /note="Description of Artificial Sequence: sequence motif"
DYAMH

SEQ ID NO: 378 - protein, 17 aa, Artificial Sequence
  source: /note="Description of Artificial Sequence: sequence motif"
GISWNSGRKDYADSVKG

SEQ ID NO: 379 - protein, 17 aa, Artificial Sequence
  source: /note="Description of Artificial Sequence: sequence motif"
EEGLGYCSGGSCSTFDY

SEQ ID NO: 380 - protein, 126 aa, Artificial Sequence
  source: /note="Description of Artificial Sequence: IL-17RA binding protein"
QVQLVESGGGLVQPGRSLRLSCAASGFTFDDYAMHWVRQAPGKGLEWVSGISWNSGRKDYADSVKGRFTISRDNAKNSLYLQMNSLRTEDTALYYCAKEEGLGYCSGGSCSTFDYRGQGTLVTVSS

SEQ ID NO: 381 - protein, 5 aa, Artificial Sequence
  source: /note="Description of Artificial Sequence: sequence motif"
DYAMH

SEQ ID NO: 382 - protein, 17 aa, Artificial Sequence
  source: /note="Description of Artificial Sequence: sequence motif"
GISWNSGRKDYADSVKG

SEQ ID NO: 383 - protein, 17 aa, Artificial Sequence
  source: /note="Description of Artificial Sequence: sequence motif"
EEGLGYCSGGSCSTFDY

SEQ ID NO: 384 - protein, 126 aa, Artificial Sequence; identical to SEQ ID NO: 380
  source: /note="Description of Artificial Sequence: IL-17RA binding protein"

SEQ ID NO: 385 - protein, 5 aa, Artificial Sequence
  source: /note="Description of Artificial Sequence: sequence motif"
DYAMH

SEQ ID NO: 386 - protein, 17 aa, Artificial Sequence
  source: /note="Description of Artificial Sequence: sequence motif"
GISWNSGRMDYADSVKG

SEQ ID NO: 387 - protein, 17 aa, Artificial Sequence
  source: /note="Description of Artificial Sequence: sequence motif"
DKGLGYCRGGSCSYFDY

SEQ ID NO: 388 - protein, 126 aa, Artificial Sequence
  source: /note="Description of Artificial Sequence: IL-17RA binding protein"
QVQLVESGGGLVQPGRSLRLSCAASGFTFDDYAMHWVRQAPGKGLEWVSGISWNSGRMDYADSVKGRFTISRDNAKNSLHLQMNSLRAEDTASYYCAKDKGLGYCRGGSCSYFDYRGQGTLVTVSS

SEQ ID NO: 389 - protein, 5 aa, Artificial Sequence
  source: /note="Description of Artificial Sequence: sequence motif"
DYAMH

SEQ ID NO: 390 - protein, 17 aa, Artificial Sequence
  source: /note="Description of Artificial Sequence: sequence motif"
GISWNSGNTDYADSVKG

SEQ ID NO: 391 - protein, 17 aa, Artificial Sequence
  source: /note="Description of Artificial Sequence: sequence motif"
EKGLGYCRGGSCSLFDY

SEQ ID NO: 392 - protein, 126 aa, Artificial Sequence
  source: /note="Description of Artificial Sequence: IL-17RA binding protein"
EVQLVESGGGLVQPGRSLRLSCAASGFTFDDYAMHWVRQAPGKGLEWVSGISWNSGNTDYADSVKGRFTISRDNAKNSLYLQMNSLRAEDTALYYCAKEKGLGYCRGGSCSLFDYWGQGTLVTVSS

SEQ ID NO: 393 - protein, 5 aa, Artificial Sequence
  source: /note="Description of Artificial Sequence: sequence motif"
DYAMH

SEQ ID NO: 394 - protein, 17 aa, Artificial Sequence
  source: /note="Description of Artificial Sequence: sequence motif"
GISWNSGSIDYADSVKG

SEQ ID NO: 395 - protein, 17 aa, Artificial Sequence
  source: /note="Description of Artificial Sequence: sequence motif"
EKGLGYCRGGSCSLFDY

SEQ ID NO: 396 - protein, 126 aa, Artificial Sequence
  source: /note="Description of Artificial Sequence: IL-17RA binding protein"
  MOD_RES (19)..(19): Any amino acid
EVQLVESGGGLVQPGRSLXLSCAASGFTFDDYAMHWVRQAPGKGLEWVSGISWNSGSIDYADSVKGRFTISRDNAKNSLYLQMNSLRAEDTALYYCAKEKGLGYCRGGSCSLFDYWGQGTLVTVSS

SEQ ID NO: 397 - protein, 5 aa, Artificial Sequence
  source: /note="Description of Artificial Sequence: sequence motif"
DYAMH

SEQ ID NO: 398 - protein, 17 aa, Artificial Sequence
  source: /note="Description of Artificial Sequence: sequence motif"
GISWNSGRKDYVDSVKG

SEQ ID NO: 399 - protein, 17 aa, Artificial Sequence
  source: /note="Description of Artificial Sequence: sequence motif"
ESSIGYCSGGSCSYFDY

SEQ ID NO: 400 - protein, 126 aa, Artificial Sequence
  source: /note="Description of Artificial Sequence: IL-17RA binding protein"
QVQLVESGGGLVQPGRSLRLSCAASGFTFDDYAMHWVRQVPGKGPEQVSGISWNSGRKDYVDSVKGRFTISRDNAKNSLYLQMNSLRAEDTALYYCAKESSIGYCSGGSCSYFDYRGQGTLVTVSS

SEQ ID NO: 401 - protein, 5 aa, Artificial Sequence
  source: /note="Description of Artificial Sequence: sequence motif"
EYAMH

SEQ ID NO: 402 - protein, 17 aa, Artificial Sequence
  source: /note="Description of Artificial Sequence: sequence motif"
GISWNSGRMDYADSVKG

SEQ ID NO: 403 - protein, 17 aa, Artificial Sequence
  source: /note="Description of Artificial Sequence: sequence motif"
DKGLGYCSGGSCSSFDY

SEQ ID NO: 404 - protein, 126 aa, Artificial Sequence
  source: /note="Description of Artificial Sequence: IL-17RA binding protein"
QVQLVESGGGLVQPGGSLRLSCAASGFTFDEYAMHWVRQAPGKGLEWVSGISWNSGRMDYADSVKGRFTISRDNAKNSLYLQMNSLRVEDTALYYCAKDKGLGYCSGGSCSSFDYWGQGTLVTVSS

SEQ ID NO: 405 - protein, 5 aa, Artificial Sequence
  source: /note="Description of Artificial Sequence: sequence motif"
DYAMH

SEQ ID NO: 406 - protein, 17 aa, Artificial Sequence
  source: /note="Description of Artificial Sequence: sequence motif"
GISWNSGRMDYADSVKG

SEQ ID NO: 407 - protein, 17 aa, Artificial Sequence
  source: /note="Description of Artificial Sequence: sequence motif"
DKGLGYCSGGSCSSFDY

SEQ ID NO: 408 - protein, 126 aa, Artificial Sequence
  source: /note="Description of Artificial Sequence: IL-17RA binding protein"
QVQLVESGGGLVQPGGSLRLSCAASGFTFDDYAMHWVRQAPGKGLEWVSGISWNSGRMDYADSVKGRFTISRDNAKNSLYLQMNSLRVEDTALYYCAKDKGLGYCSGGSCSSFDYWGQGTLVTVSS

SEQ ID NO: 409 - protein, 5 aa, Artificial Sequence
  source: /note="Description of Artificial Sequence: sequence motif"
DYAMH

SEQ ID NO: 410 - protein, 17 aa, Artificial Sequence
  source: /note="Description of Artificial Sequence: sequence motif"
GISWNSGRKDYADSVKG

SEQ ID NO: 411 - protein, 17 aa, Artificial Sequence
  source: /note="Description of Artificial Sequence: sequence motif"
EMGLGYCSGGSCSYFDY

SEQ ID NO: 412 - protein, 126 aa, Artificial Sequence
  source: /note="Description of Artificial Sequence: IL-17RA binding protein"
EVQLVESGGGLVQPGRSLRLSCAASGFTFDDYAMHWVRQAPGKGQEWVSGISWNSGRKDYADSVKGRFTISRDNAKNSLYLQMNSLRAEDTALYYCAKEMGLGYCSGGSCSYFDYWGQGTLVTVSS

SEQ ID NO: 413 - protein, 5 aa, Artificial Sequence
  source: /note="Description of Artificial Sequence: sequence motif"
DYAMH

SEQ ID NO: 414 - protein, 17 aa, Artificial Sequence
  source: /note="Description of Artificial Sequence: sequence motif"
GISWNSGRKDYADSVKG

SEQ ID NO: 415 - protein, 17 aa, Artificial Sequence
  source: /note="Description of Artificial Sequence: sequence motif"
EMGLGYCSGGSCSYFDY

SEQ ID NO: 416 - protein, 126 aa, Artificial Sequence; identical to SEQ ID NO: 412
  source: /note="Description of Artificial Sequence: IL-17RA binding protein"

SEQ ID NO: 417 - protein, 5 aa, Artificial Sequence
  source: /note="Description of Artificial Sequence: sequence motif"
DYAMH

SEQ ID NO: 418 - protein, 17 aa, Artificial Sequence
  source: /note="Description of Artificial Sequence: sequence motif"
GISWNSGRKDYADSVKG

SEQ ID NO: 419 - protein, 17 aa, Artificial Sequence
  source: /note="Description of Artificial Sequence: sequence motif"
EMGLGYCSGGSCSYFDY

SEQ ID NO: 420 - protein, 126 aa, Artificial Sequence; identical to SEQ ID NO: 412
  source: /note="Description of Artificial Sequence: IL-17RA binding protein"

SEQ ID NO: 421 - protein, 5 aa, Artificial Sequence
  source: /note="Description of Artificial Sequence: sequence motif"
DYAMH

SEQ ID NO: 422 - protein, 17 aa, Artificial Sequence
  source: /note="Description of Artificial Sequence: sequence motif"
GISWNSGRKDYADSVKG

SEQ ID NO: 423 - protein, 17 aa, Artificial Sequence
  source: /note="Description of Artificial Sequence: sequence motif"
EMGLGYCSGGSCSYFDY

SEQ ID NO: 424 - protein, 126 aa, Artificial Sequence; identical to SEQ ID NO: 412
  source: /note="Description of Artificial Sequence: IL-17RA binding protein"

SEQ ID NO: 425 - protein, 5 aa, Artificial Sequence
  source: /note="Description of Artificial Sequence: sequence motif"
DYAMH

SEQ ID NO: 426 - protein, 17 aa, Artificial Sequence
  source: /note="Description of Artificial Sequence: sequence motif"
GISWNSGRKDYADSVKG

SEQ ID NO: 427 - protein, 17 aa, Artificial Sequence
  source: /note="Description of Artificial Sequence: sequence motif"
EMGLGYCSGGSCSYFDY

SEQ ID NO: 428 - protein, 126 aa, Artificial Sequence; identical to SEQ ID NO: 412
  source: /note="Description of Artificial Sequence: IL-17RA binding protein"

SEQ ID NO: 429 - protein, 5 aa, Artificial Sequence
  source: /note="Description of Artificial Sequence: sequence motif"
DYAMH

SEQ ID NO: 430 - protein, 17 aa, Artificial Sequence
  source: /note="Description of Artificial Sequence: sequence motif"
GISWNSGRKDYADSVKG

SEQ ID NO: 431 - protein, 17 aa, Artificial Sequence
  source: /note="Description of Artificial Sequence: sequence motif"
EMGLGYCSGGSCSYFDY

SEQ ID NO: 432 - protein, 126 aa, Artificial Sequence
  source: /note="Description of Artificial Sequence: IL-17RA binding protein"
QVQLVESGGGLVQPGRSLRLSCAASGFTFDDYAMHWVRQAPGKGQEWVSGISWNSGRKDYADSVKGRFTISRDNAKNSLYLQMNSLRAEDTALYYCAKEMGLGYCSGGSCSYFDYWGQGTLVTVSS

SEQ ID NO: 433 - protein, 5 aa, Artificial Sequence
  source: /note="Description of Artificial Sequence: sequence motif"
DYAMH

SEQ ID NO: 434 - protein, 17 aa, Artificial Sequence
  source: /note="Description of Artificial Sequence: sequence motif"
GISWNSGRKDYADSVKG

SEQ ID NO: 435 - protein, 17 aa, Artificial Sequence
  source: /note="Description of Artificial Sequence: sequence motif"
EMGLGYCSGGSCSYFDY

SEQ ID NO: 436 - protein, 126 aa, Artificial Sequence; identical to SEQ ID NO: 432
  source: /note="Description of Artificial Sequence: IL-17RA binding protein"

SEQ ID NO: 437 - protein, 5 aa, Artificial Sequence
  source: /note="Description of Artificial Sequence: sequence motif"
DYAMH

SEQ ID NO: 438 - protein, 17 aa, Artificial Sequence
  source: /note="Description of Artificial Sequence: sequence motif"
GISWNSGRKDYVDSVKG

SEQ ID NO: 439 - protein, 17 aa, Artificial Sequence
  source: /note="Description of Artificial Sequence: sequence motif"
ESSIGYCSGGSCSYFDY

SEQ ID NO: 440 - protein, 126 aa, Artificial Sequence
  source: /note="Description of Artificial Sequence: IL-17RA binding protein"
EVQLVESGGGLVQPGRSLRLSCAASGFTFDDYAMHWVRQVPGKGPEWVSGISWNSGRKDYVDSVKGRFTISRDNAKNSLYLQMNSLRVEDTALYYCAKESSIGYCSGGSCSYFDYRGQGTLVTVSS

SEQ ID NO: 441 - protein, 5 aa, Artificial Sequence
  source: /note="Description of Artificial Sequence: sequence motif"
DYAMH

SEQ ID NO: 442 - protein, 17 aa, Artificial Sequence
  source: /note="Description of Artificial Sequence: sequence motif"
GISWNSGRKDYADSVKG

SEQ ID NO: 443 - protein, 17 aa, Artificial Sequence
  source: /note="Description of Artificial Sequence: sequence motif"
EGSLGYCRGGSCSHFDY

SEQ ID NO: 444 - protein, 126 aa, Artificial Sequence
  source: /note="Description of Artificial Sequence: IL-17RA binding protein"
EVQLVESGGGLVQPGGSLRLSCAVSGFTFDDYAMHWVRQAPGKGLEWVSGISWNSGRKDYADSVKGRFTISRDSVKNSLYLQMNSLRAEDTALYYCAKEGSLGYCRGGSCSHFDYRGQGTLVTVSS

SEQ ID NO: 445 - protein, 5 aa, Artificial Sequence
  source: /note="Description of Artificial Sequence: sequence motif"
DYAMH

SEQ ID NO: 446 - protein, 17 aa, Artificial Sequence
  source: /note="Description of Artificial Sequence: sequence motif"
GISWNSGTKDYADSVKG

SEQ ID NO: 447 - protein, 17 aa, Artificial Sequence
  source: /note="Description of Artificial Sequence: sequence motif"
ESSLGYCRGGSCSSFDY

SEQ ID NO: 448 - protein, 126 aa, Artificial Sequence
  source: /note="Description of Artificial Sequence: IL-17RA binding protein"
QVQLVESGGGLVQPGRSLRLSCAASGFTFDDYAMHWVRQAPGKGLEWVSGISWNSGTKDYADSVKGRFSISRDNAKNSLYLQMNSLRTEDTAVYLCAKESSLGYCRGGSCSSFDYGGQGTLVTVSS

SEQ ID NO: 449 - protein, 5 aa, Artificial Sequence
  source: /note="Description of Artificial Sequence: sequence motif"
DYAMH

SEQ ID NO: 450 - protein, 17 aa, Artificial Sequence
  source: /note="Description of Artificial Sequence: sequence motif"
GISWNSGTKDYADSVKG

SEQ ID NO: 451 - protein, 17 aa, Artificial Sequence
  source: /note="Description of Artificial Sequence: sequence motif"
ESSLGYCRGGSCSSFDY

SEQ ID NO: 452 - protein, 126 aa, Artificial Sequence; identical to SEQ ID NO: 448
  source: /note="Description of Artificial Sequence: IL-17RA binding protein"

SEQ ID NO: 453 - protein, 5 aa, Artificial Sequence
  source: /note="Description of Artificial Sequence: sequence motif"
DYAMH

SEQ ID NO: 454 - protein, 17 aa, Artificial Sequence
  source: /note="Description of Artificial Sequence: sequence motif"
GISWNSGTKDYADSVKG

SEQ ID NO: 455 - protein, 17 aa, Artificial Sequence
  source: /note="Description of Artificial Sequence: sequence motif"
ESSLGYCRGGSCSSFDY

SEQ ID NO: 456 - protein, 126 aa, Artificial Sequence; identical to SEQ ID NO: 448
  source: /note="Description of Artificial Sequence: IL-17RA binding protein"

SEQ ID NO: 457 - protein, 5 aa, Artificial Sequence
  source: /note="Description of Artificial Sequence: sequence motif"
DYAMH

SEQ ID NO: 458 - protein, 17 aa, Artificial Sequence
  source: /note="Description of Artificial Sequence: sequence motif"
GISWNSGTKDYADSVKG

SEQ ID NO: 459 - protein, 17 aa, Artificial Sequence
  source: /note="Description of Artificial Sequence: sequence motif"
ESSLGYCRGGSCSSFEY

SEQ ID NO: 460 - protein, 126 aa, Artificial Sequence
  source: /note="Description of Artificial Sequence: IL-17RA binding protein"
EVQLVESGGGLVQPGRSLRLSCAASGFTFDDYAMHWVRQTPGKGLEWVSGISWNSGTKDYADSVKGRFSISRDNAKNSLYLQMNSLRTEDTAVYLCAKESSLGYCRGGSCSSFEYGGQGTLVTVSS

SEQ ID NO: 461 - protein, 5 aa, Artificial Sequence
  source: /note="Description of Artificial Sequence: sequence motif"
DYAMH

SEQ ID NO: 462 - protein, 17 aa, Artificial Sequence
  source: /note="Description of Artificial Sequence: sequence motif"
GISWNSGTKDYADSVKG

SEQ ID NO: 463 - protein, 17 aa, Artificial Sequence
  source: /note="Description of Artificial Sequence: sequence motif"
ESSLGYCRGGSCSSFDY

SEQ ID NO: 464 - protein, 126 aa, Artificial Sequence
  source: /note="Description of Artificial Sequence: IL-17RA binding protein"
EVQLVESGGGLVQPGRSLRLSCAASGFTFDDYAMHWVRQAPGKGLEWVSGISWNSGTKDYADSVKGRFSISRDNAKNSLYLQMNSLRTEDTAVYLCAKESSLGYCRGGSCSSFDYGGRGTLVTVSS

SEQ ID NO: 465 - protein, 5 aa, Artificial Sequence
  source: /note="Description of Artificial Sequence: sequence motif"
DYAMH

SEQ ID NO: 466 - protein, 17 aa, Artificial Sequence
  source: /note="Description of Artificial Sequence: sequence motif"
GISWNSGTKDYADSVKG

SEQ ID NO: 467 - protein, 17 aa, Artificial Sequence
  source: /note="Description of Artificial Sequence: sequence motif"
ESSLGYCRGGSCSSFDY

SEQ ID NO: 468 - protein, 126 aa, Artificial Sequence; identical to SEQ ID NO: 464
  source: /note="Description of Artificial Sequence: IL-17RA binding protein"

SEQ ID NO: 469 - protein, 5 aa, Artificial Sequence
  source: /note="Description of Artificial Sequence: sequence motif"
DYAMH

SEQ ID NO: 470 - protein, 17 aa, Artificial Sequence
  source: /note="Description of Artificial Sequence: sequence motif"
GISWNSGTKDYADSVKG

SEQ ID NO: 471 - protein, 17 aa, Artificial Sequence
  source: /note="Description of Artificial Sequence: sequence motif"
ESSLGYCRGGSCSSFDY

SEQ ID NO: 472 - protein, 126 aa, Artificial Sequence
  source: /note="Description of Artificial Sequence: IL-17RA binding protein"
QVQLVESGGGLVQPGRSLRLSCAASGFTFDDYAMHWVRQAPGKGLEWVSGISWNSGTKDYADSVKGRFTISRDNAKNSLYLQMNSLRAEDTAVYHCAKESSLGYCRGGSCSSFDYWGQGTLVTVSS

SEQ ID NO: 473 - protein, 5 aa, Artificial Sequence
  source: /note="Description of Artificial Sequence: sequence motif"
DYAMH

SEQ ID NO: 474 - protein, 17 aa, Artificial Sequence
  source: /note="Description of Artificial Sequence: sequence motif"
GISWNSGTKDYADSVKG

SEQ ID NO: 475 - protein, 17 aa, Artificial Sequence
  source: /note="Description of Artificial Sequence: sequence motif"
ESSLGYCRGGSCSSFDY

SEQ ID NO: 476 - protein, 126 aa, Artificial Sequence; identical to SEQ ID NO: 472
  source: /note="Description of Artificial Sequence: IL-17RA binding protein"

SEQ ID NO: 477 - protein, 5 aa, Artificial Sequence
  source: /note="Description of Artificial Sequence: sequence motif"
DYAMH

SEQ ID NO: 478 - protein, 17 aa, Artificial Sequence
  source: /note="Description of Artificial Sequence: sequence motif"
GISWNSGTKGYADSVKG

SEQ ID NO: 479 - protein, 17 aa, Artificial Sequence
  source: /note="Description of Artificial Sequence: sequence motif"
ESSLGYCRGGSCSSFDY

SEQ ID NO: 480 - protein, 126 aa, Artificial Sequence
  source: /note="Description of Artificial Sequence: IL-17RA binding protein"
QVQLVESGGGLVQPGRSLRLSCAASGFTFDDYAMHWVRQAPGKGLEWVSGISWNSGTKGYADSVKGRFTISRDNAKNSLYLQMNSLRAEDTAVYHCAKESSLGYCRGGSCSSFDYWGQGTLVTVSS

SEQ ID NO: 481 - protein, 5 aa, Artificial Sequence
  source: /note="Description of Artificial Sequence: sequence motif"
EYAMH

SEQ ID NO: 482 - protein, 17 aa, Artificial Sequence
  source: /note="Description of Artificial Sequence: sequence motif"
GISWNSGTRDYADSVKG

SEQ ID NO: 483 - protein, 17 aa, Artificial Sequence
  source: /note="Description of Artificial Sequence: sequence motif"
ESSLGYCRGGSCSSFDY

SEQ ID NO: 484 - protein, 126 aa, Artificial Sequence
  source: /note="Description of Artificial Sequence: IL-17RA binding protein"
EVQLVESGGGLVQPGRSLRLSCAASGFTFDEYAMHWVRQAPGKGLEWVSGISWNSGTRDYADSVKGRFTISRDNAKNSLYLQMNSLRAEDTAVYHCAKESSLGYCRGGSCSSFDYWGQGTLVTVSS

SEQ ID NO: 485 - protein, 5 aa, Artificial Sequence
  source: /note="Description of Artificial Sequence: sequence motif"
DYAMH

SEQ ID NO: 486 - protein, 17 aa, Artificial Sequence
  source: /note="Description of Artificial Sequence: sequence motif"
GISWNSGRMDYADSVKG

SEQ ID NO: 487 - protein, 17 aa, Artificial Sequence
  source: /note="Description of Artificial Sequence: sequence motif"
ESSIGYCSGGSCSNFDY

SEQ ID NO: 488 - protein, 126 aa, Artificial Sequence
  source: /note="Description of Artificial Sequence: IL-17RA binding protein"
EVQLVESGGGLVQPGRSLRLSCAASGFTFDDYAMHWVRQTPGKGLEWVSGISWNSGRMDYADSVKGRFTISRDNAKNSLYLQMNSLRPEDTALYYCAKESSIGYCSGGSCSNFDYWGQGTLVTVSS

SEQ ID NO: 489 - protein, 5 aa, Artificial Sequence
  source: /note="Description of Artificial Sequence: sequence motif"
DYAMH

SEQ ID NO: 490 - protein, 17 aa, Artificial Sequence
  source: /note="Description of Artificial Sequence: sequence motif"
GISWNSGRMDYADSVKG

SEQ ID NO: 491 - protein, 17 aa, Artificial Sequence
  source: /note="Description of Artificial Sequence: sequence motif"
ESSIGYCSGGSCSNFDY

SEQ ID NO: 492 - protein, 126 aa, Artificial Sequence; identical to SEQ ID NO: 488
  source: /note="Description of Artificial Sequence: IL-17RA binding protein"

SEQ ID NO: 493 - protein, 5 aa, Artificial Sequence
  source: /note="Description of Artificial Sequence: sequence motif"
DYAMH

SEQ ID NO: 494 - protein, 17 aa, Artificial Sequence
  source: /note="Description of Artificial Sequence: sequence motif"
GISWNSGRIDYADSVKG

SEQ ID NO: 495 - protein, 17 aa, Artificial Sequence
  source: /note="Description of Artificial Sequence: sequence motif"
DMGLGYCSGGSCSHFDH

SEQ ID NO: 496 - protein, 126 aa, Artificial Sequence
  source: /note="Description of Artificial Sequence: IL-17RA binding protein"
EVQLVESGGGLVQPGRSLRLSCAASGFPFDDYAMHWVRQAPGKGLEWVSGISWNSGRIDYADSVKGRFTISRDNAKNSLYLQMNSLRAEDTALYYCAKDMGLGYCSGGSCSHFDHWGQGTLVTVSS

SEQ ID NO: 497 - protein, 5 aa, Artificial Sequence
  source: /note="Description of Artificial Sequence: sequence motif"
DYAMH

SEQ ID NO: 498 - protein, 17 aa, Artificial Sequence
  source: /note="Description of Artificial Sequence: sequence motif"
GISWNGGSMDYADSVKG

SEQ ID NO: 499 - protein, 17 aa, Artificial Sequence
  source: /note="Description of Artificial Sequence: sequence motif"
DRGLGYCRGGSCSSLDY

SEQ ID NO: 500 - protein, 126 aa, Artificial Sequence
  source: /note="Description of Artificial Sequence: IL-17RA binding protein"
QVQLVESGGGLVQPGRSLRLSCAASGFTFDDYAMHWVRQAPGKGLEWVSGISWNGGSMDYADSVKGRFTISRDNAKNSLYLQMNSLRAEDTAVYYCAKDRGLGYCRGGSCSSLDYWGQGTLVTVSS

SEQ ID NO: 501 - protein, 5 aa, Artificial Sequence
  source: /note="Description of Artificial Sequence: sequence motif"
DYAMH

SEQ ID NO: 502 - protein, 17 aa, Artificial Sequence
  source: /note="Description of Artificial Sequence: sequence motif"
GISWNGGSMDYADSVKG

SEQ ID NO: 503 - protein, 17 aa, Artificial Sequence
  source: /note="Description of Artificial Sequence: sequence motif"
DRGLGYCRGGTCSSLDY

SEQ ID NO: 504 - protein, 126 aa, Artificial Sequence
  source: /note="Description of Artificial Sequence: IL-17RA binding protein"
QVQLVESGGGLVQPGGSLRLSCAASGFTFDDYAMHWVRQAPGKGLEWVSGISWNGGSMDYADSVKGRFTISRDNAKNSLYLQMNSLRAEDTALYYCAKDRGLGYCRGGTCSSLDYWGQGTLVTVSS

SEQ ID NO: 505 - protein, 5 aa, Artificial Sequence
  source: /note="Description of Artificial Sequence: sequence motif"
DYAMH

SEQ ID NO: 506 - protein, 17 aa, Artificial Sequence
  source: /note="Description of Artificial Sequence: sequence motif"
GISWNSGRTGYADSVKG

SEQ ID NO: 507 - protein, 17 aa, Artificial Sequence
  source: /note="Description of Artificial Sequence: sequence motif"
DASLGFCSGGSCSHFDY

SEQ ID NO: 508 - protein, 126 aa, Artificial Sequence
  source: /note="Description of Artificial Sequence: IL-17RA binding protein"
EVQLVESGGGLVQPGGSLRLSCAASGFTFDDYAMHWVRQAPGKGLEWVSGISWNSGRTGYADSVKGRFTISRDNAKNSLYLQMNSLRTEDTALYYCAKDASLGFCSGGSCSHFDYRGQGIQVTVSS

SEQ ID NO: 509 - protein, 5 aa, Artificial Sequence
  source: /note="Description of Artificial Sequence: sequence motif"
EYAMH

SEQ ID NO: 510 - protein, 17 aa, Artificial Sequence
  source: /note="Description of Artificial Sequence: sequence motif"
GISWNSGRLGYADSVKG

SEQ ID NO: 511 - protein, 17 aa, Artificial Sequence
  source: /note="Description of Artificial Sequence: sequence motif"
ESSLGYCSGGSCSHFDY

SEQ ID NO: 512 - protein, 126 aa, Artificial Sequence
  source: /note="Description of Artificial Sequence: IL-17RA binding protein"
EVQLVESGGGLVQPGRSLRLSCAASGFPFDEYAMHWVRQAPGKGLEWVSGISWNSGRLGYADSVKGRFTISRDNAKKSLHLQMNSLRAEDTAMYYCAKESSLGYCSGGSCSHFDYRGQGTLVTVSS

SEQ ID NO: 513 - protein, 5 aa, Artificial Sequence
  source: /note="Description of Artificial Sequence: sequence motif"
EYAMH

SEQ ID NO: 514 - protein, 17 aa, Artificial Sequence
  source: /note="Description of Artificial Sequence: sequence motif"
GISWNSGRLGYADSVKG

SEQ ID NO: 515 - protein, 17 aa, Artificial Sequence
  source: /note="Description of Artificial Sequence: sequence motif"
ESSLGYCSGGSCSHFDY

SEQ ID NO: 516 - protein, 126 aa, Artificial Sequence; identical to SEQ ID NO: 512
  source: /note="Description of Artificial Sequence: IL-17RA binding protein"

SEQ ID NO: 517 - protein, 5 aa, Artificial Sequence
  source: /note="Description of Artificial Sequence: sequence motif"
EYAMH

SEQ ID NO: 518 - protein, 17 aa, Artificial Sequence
  source: /note="Description of Artificial Sequence: sequence motif"
GISWNSGRLGYADSVKG

SEQ ID NO: 519 - protein, 17 aa, Artificial Sequence
  source: /note="Description of Artificial Sequence: sequence motif"
ESSLGYCSGGSCSHFDY

SEQ ID NO: 520 - protein, 126 aa, Artificial Sequence; identical to SEQ ID NO: 512
  source: /note="Description of Artificial Sequence: IL-17RA binding protein"

SEQ ID NO: 521 - protein, 5 aa, Artificial Sequence
  source: /note="Description of Artificial Sequence: sequence motif"
EYAMH

SEQ ID NO: 522 - protein, 17 aa, Artificial Sequence
  source: /note="Description of Artificial Sequence: sequence motif"
GISWNSGRLGYADSVKG

SEQ ID NO: 523 - protein, 17 aa, Artificial Sequence
  source: /note="Description of Artificial Sequence: sequence motif"
ESSLGYCSGGSCSHFDY

SEQ ID NO: 524 - protein, 126 aa, Artificial Sequence; identical to SEQ ID NO: 512
  source: /note="Description of Artificial Sequence: IL-17RA binding protein"

SEQ ID NO: 525 - protein, 5 aa, Artificial Sequence
  source: /note="Description of Artificial Sequence: sequence motif"
EYAMH

SEQ ID NO: 526 - protein, 17 aa, Artificial Sequence
  source: /note="Description of Artificial Sequence: sequence motif"
GISWNSGRLGYADSVKG

SEQ ID NO: 527 - protein, 17 aa, Artificial Sequence
  source: /note="Description of Artificial Sequence: sequence motif"
ESSLGYCSGGSCSHFDY

SEQ ID NO: 528 - protein, 126 aa, Artificial Sequence; identical to SEQ ID NO: 512
  source: /note="Description of Artificial Sequence: IL-17RA binding protein"

SEQ ID NO: 529 - protein, 5 aa, Artificial Sequence
  source: /note="Description of Artificial Sequence: sequence motif"
EYAMH

SEQ ID NO: 530 - protein, 17 aa, Artificial Sequence
  source: /note="Description of Artificial Sequence: sequence motif"
GISWNSGRLGYADSVKG

SEQ ID NO: 531 - protein, 17 aa, Artificial Sequence
  source: /note="Description of Artificial Sequence: sequence motif"
ESSLGYCSGGSCSHFDY

SEQ ID NO: 532 - protein, 126 aa, Artificial Sequence; identical to SEQ ID NO: 512
  source: /note="Description of Artificial Sequence: IL-17RA binding protein"

SEQ ID NO: 533 - protein, 5 aa, Artificial Sequence
  source: /note="Description of Artificial Sequence: sequence motif"
EYAMH

SEQ ID NO: 534 - protein, 17 aa, Artificial Sequence
  source: /note="Description of Artificial Sequence: sequence motif"
GISWNSGRLGYADSVKG

SEQ ID NO: 535 - protein, 17 aa, Artificial Sequence
  source: /note="Description of Artificial Sequence: sequence motif"
ESSLGYCSGGSCSHFDY

SEQ ID NO: 536 - protein, 126 aa, Artificial Sequence; identical to SEQ ID NO: 512
  source: /note="Description of Artificial Sequence: IL-17RA binding protein"

SEQ ID NO: 537 - protein, 5 aa, Artificial Sequence
  source: /note="Description of Artificial Sequence: sequence motif"
EYAMH

SEQ ID NO: 538 - protein, 17 aa, Artificial Sequence
  source: /note="Description of Artificial Sequence: sequence motif"
GISWNSGRLGYADSVKG

SEQ ID NO: 539 - protein, 17 aa, Artificial Sequence
  source: /note="Description of Artificial Sequence: sequence motif"
ESSLGYCSGGSCSHFDY

SEQ ID NO: 540 - protein, 126 aa, Artificial Sequence; identical to SEQ ID NO: 512
  source: /note="Description of Artificial Sequence: IL-17RA binding protein"

SEQ ID NO: 541 - protein, 5 aa, Artificial Sequence
  source: /note="Description of Artificial Sequence: sequence motif"
EYAMH

SEQ ID NO: 542 - protein, 17 aa, Artificial Sequence
  source: /note="Description of Artificial Sequence: sequence motif"
GISWNSGRLGYADSVKG

SEQ ID NO: 543 - protein, 17 aa, Artificial Sequence
  source: /note="Description of Artificial Sequence: sequence motif"
ESSLGYCSGGSCSHFDY

SEQ ID NO: 544 - protein, 126 aa, Artificial Sequence; identical to SEQ ID NO: 512
  source: /note="Description of Artificial Sequence: IL-17RA binding protein"

SEQ ID NO: 545 - protein, 5 aa, Artificial Sequence
  source: /note="Description of Artificial Sequence: sequence motif"
EYAMH

SEQ ID NO: 546 - protein, 17 aa, Artificial Sequence
  source: /note="Description of Artificial Sequence: sequence motif"
GISWNSGRLGYADSVKG

SEQ ID NO: 547 - protein, 17 aa, Artificial Sequence
  source: /note="Description of Artificial Sequence: sequence motif"
ESSLGYCSGGSCSHFDY

SEQ ID NO: 548 - protein, 126 aa, Artificial Sequence; identical to SEQ ID NO: 512
  source: /note="Description of Artificial Sequence: IL-17RA binding protein"

SEQ ID NO: 549 - protein, 5 aa, Artificial Sequence
  source: /note="Description of Artificial Sequence: sequence motif"
EYAMH

SEQ ID NO: 550 - protein, 17 aa, Artificial Sequence
  source: /note="Description of Artificial Sequence: sequence motif"
GISWNSGRLGYADSVKG

SEQ ID NO: 551 - protein, 17 aa, Artificial Sequence
  source: /note="Description of Artificial Sequence: sequence motif"
ESSLGYCSGGSCSHFDY

SEQ ID NO: 552 - protein, 126 aa, Artificial Sequence; identical to SEQ ID NO: 512
  source: /note="Description of Artificial Sequence: IL-17RA binding protein"

SEQ ID NO: 553 - protein, 5 aa, Artificial Sequence
  source: /note="Description of Artificial Sequence: sequence motif"
EYAMH

SEQ ID NO: 554 - protein, 17 aa, Artificial Sequence
  source: /note="Description of Artificial Sequence: sequence motif"
GISWNSGRLGYADSVKG

SEQ ID NO: 555 - protein, 17 aa, Artificial Sequence
  source: /note="Description of Artificial Sequence: sequence motif"
ESSLGYCSGGSCSHFDY

SEQ ID NO: 556 - protein, 126 aa, Artificial Sequence; identical to SEQ ID NO: 512
  source: /note="Description of Artificial Sequence: IL-17RA binding protein"

SEQ ID NO: 557 - protein, 5 aa, Artificial Sequence
  source: /note="Description of Artificial Sequence: sequence motif"
EYAMH

SEQ ID NO: 558 - protein, 17 aa, Artificial Sequence
  source: /note="Description of Artificial Sequence: sequence motif"
GISWNSGRLGYADSVKG

SEQ ID NO: 559 - protein, 17 aa, Artificial Sequence
  source: /note="Description of Artificial Sequence: sequence motif"
ESSLGYCSGGSCSHFDY

SEQ ID NO: 560 - protein, 126 aa, Artificial Sequence; identical to SEQ ID NO: 512
  source: /note="Description of Artificial Sequence: IL-17RA binding protein"

SEQ ID NO: 561 - protein, 5 aa, Artificial Sequence
  source: /note="Description of Artificial Sequence: sequence motif"
EYAMH

SEQ ID NO: 562 - protein, 17 aa, Artificial Sequence
  source: /note="Description of Artificial Sequence: sequence motif"
GISWNSGRLDYADSVKG

SEQ ID NO: 563 - protein, 17 aa, Artificial Sequence
  source: /note="Description of Artificial Sequence: sequence motif"
ESSLGYCSGGSCSHFDY

SEQ ID NO: 564 - protein, 126 aa, Artificial Sequence
  source: /note="Description of Artificial Sequence: IL-17RA binding protein"
EVQLVESGGGLVQPGRSLRLSCAASGFPFDEYAMHWVRQAPGKGLEWVSGISWNSGRLDYADSVKGRFTISRDNAKKSLHLQMNSLRAEDTAMYYCAKESSLGYCSGGSCSHFDYRGQGTLVTVSS

SEQ ID NO: 565 - protein, 5 aa, Artificial Sequence
  source: /note="Description of Artificial Sequence: sequence motif"
EYAMH

SEQ ID NO: 566 - protein, 17 aa, Artificial Sequence
  source: /note="Description of Artificial Sequence: sequence motif"
GISWNSGRLDYADSVKG

SEQ ID NO: 567 - protein, 17 aa, Artificial Sequence
  source: /note="Description of Artificial Sequence: sequence motif"
ESSLGYCSGGSCSHFDY

SEQ ID NO: 568 - protein, 126 aa, Artificial Sequence; identical to SEQ ID NO: 564
  source: /note="Description of Artificial Sequence: IL-17RA binding protein"

SEQ ID NO: 569 - protein, 5 aa, Artificial Sequence
  source: /note="Description of Artificial Sequence: sequence motif"
EYAMH

SEQ ID NO: 570 - protein, 17 aa, Artificial Sequence
  source: /note="Description of Artificial Sequence: sequence motif"
GISWNSGRLDYADSVKG

SEQ ID NO: 571 - protein, 17 aa, Artificial Sequence
  source: /note="Description of Artificial Sequence: sequence motif"
ESSLGYCSGGSCSHFDY

SEQ ID NO: 572 - protein, 126 aa, Artificial Sequence; identical to SEQ ID NO: 564
  source: /note="Description of Artificial Sequence: IL-17RA binding protein"

SEQ ID NO: 573 - protein, 5 aa, Artificial Sequence
  source: /note="Description of Artificial Sequence: sequence motif"
EYAMH

SEQ ID NO: 574 - protein, 17 aa, Artificial Sequence
  source: /note="Description of Artificial Sequence: sequence motif"
GISWNSGRLDYADSVKG

SEQ ID NO: 575 - protein, 17 aa, Artificial Sequence
  source: /note="Description of Artificial Sequence: sequence motif"
ESSLGYCSGGSCSHFDY

SEQ ID NO: 576 - protein, 126 aa, Artificial Sequence; identical to SEQ ID NO: 564
  source: /note="Description of Artificial Sequence: IL-17RA binding protein"

SEQ ID NO: 577 - protein, 5 aa, Artificial Sequence
  source: /note="Description of Artificial Sequence: sequence motif"
EYAMH

SEQ ID NO: 578 - protein, 17 aa, Artificial Sequence
  source: /note="Description of Artificial Sequence: sequence motif"
GISWNSGRLDYADSVKG

SEQ ID NO: 579 - protein, 17 aa, Artificial Sequence
  source: /note="Description of Artificial Sequence: sequence motif"
ESSLGYCSGGSCSHFDY

SEQ ID NO: 580 - protein, 126 aa, Artificial Sequence; identical to SEQ ID NO: 564
  source: /note="Description of Artificial Sequence: IL-17RA binding protein"

SEQ ID NO: 581 - protein, 5 aa, Artificial Sequence
  source: /note="Description of Artificial Sequence: sequence motif"
EYAMH

SEQ ID NO: 582 - protein, 17 aa, Artificial Sequence
  source: /note="Description of Artificial Sequence: sequence motif"
GISWNSGRLGYADPVKG

SEQ ID NO: 583 - protein, 17 aa, Artificial Sequence
  source: /note="Description of Artificial Sequence: sequence motif"
ESSLGYCSGGSCSHFDY

SEQ ID NO: 584 - protein, 126 aa, Artificial Sequence
  source: /note="Description of Artificial Sequence: IL-17RA binding protein"
QVQLVESGGGLVQPGRSLRLSCAASGFPFDEYAMHWVRQAPGKGLEWVSGISWNSGRLGYADPVKGRFTISRDNAKKSLHLQMNSLRAEDTAMYYCAKESSLGYCSGGSCSHFDYRGQGTLVTVSS

SEQ ID NO: 585 - protein, 5 aa, Artificial Sequence
  source: /note="Description of Artificial Sequence: sequence motif"
EYAMH

SEQ ID NO: 586 - protein, 17 aa, Artificial Sequence
  source: /note="Description of Artificial Sequence: sequence motif"
GISWNSGRLGYADSVKG

SEQ ID NO: 587 - protein, 17 aa, Artificial Sequence
  source: /note="Description of Artificial Sequence: sequence motif"
ESSLGYCSGGSCSHFDY

SEQ ID NO: 588 - protein, 126 aa, Artificial Sequence
  source: /note="Description of Artificial Sequence: IL-17RA binding protein"
QVQLVESGGGLVQPGRSLRLSCAASGFPFDEYAMHWVRQAPGKGLEWVSGISWNSGRLGYADSVKGRFTISRDNAKKSLHLQMNSLRAEDTAMYYCAKESSLGYCSGGSCSHFDYRGQGTLVTVSS

SEQ ID NO: 589 - protein, 5 aa, Artificial Sequence
  source: /note="Description of Artificial Sequence: sequence motif"
EYAMH

SEQ ID NO: 590 - protein, 17 aa, Artificial Sequence
  source: /note="Description of Artificial Sequence: sequence motif"
GISWNSGRLGYADSVKG

SEQ ID NO: 591 - protein, 17 aa, Artificial Sequence
  source: /note="Description of Artificial Sequence: sequence motif"
ESSLGYCSGGSCSHFDY

SEQ ID NO: 592 - protein, 126 aa, Artificial Sequence
  source: /note="Description of Artificial Sequence: IL-17RA binding protein"
EVQLVESGGGLVQPGRSLRLSCAASGFPFDEYAMHWVRQAPGKGLEWVSGISWNSGRLGYADSVKGRFTISRDNAKKSLHLQMNSLRVEDTAMYYCAKESSLGYCSGGSCSHFDYRGQGTLVTVSS

SEQ ID NO: 593 - protein, 5 aa, Artificial Sequence
  source: /note="Description of Artificial Sequence: sequence motif"
EYAMH

SEQ ID NO: 594 - protein, 17 aa, Artificial Sequence
  source: /note="Description of Artificial Sequence: sequence motif"
GISWNSGRLGYADSVKG

SEQ ID NO: 595 - protein, 17 aa, Artificial Sequence
  source: /note="Description of Artificial Sequence: sequence motif"
ESSLGYCSGGSCSHFDY

SEQ ID NO: 596 - protein, 126 aa, Artificial Sequence; identical to SEQ ID NO: 592
  source: /note="Description of Artificial Sequence: IL-17RA binding protein"

SEQ ID NO: 597 - protein, 5 aa, Artificial Sequence
  source: /note="Description of Artificial Sequence: sequence motif"
EYAMH

SEQ ID NO: 598 - protein, 17 aa, Artificial Sequence
  source: /note="Description of Artificial Sequence: sequence motif"
GISWNSGRLDYADSVKG

SEQ ID NO: 599 - protein, 17 aa, Artificial Sequence
  source: /note="Description of Artificial Sequence: sequence motif"
ESSLGYCSGGSCSHFDY

SEQ ID NO: 600 - protein, 126 aa, Artificial Sequence
  source: /note="Description of Artificial Sequence: IL-17RA binding protein"
QVQLVESGGGLVQPGRSLRLSCAASGFPFDEYAMHWVRQAPGKGLEWVSGISWNSGRLDYADSVKGRFTISRDNAKKSLHLQMNSLRAEDTAMYYCAKESSLGYCSGGSCSHFDYRGQGTLVTVSS

SEQ ID NO: 601 - protein, 5 aa, Artificial Sequence
  source: /note="Description of Artificial Sequence: sequence motif"
  MOD_RES (1)..(1): Any amino acid
XYAMH

SEQ ID NO: 602 - protein, 17 aa, Artificial Sequence
  source: /note="Description of Artificial Sequence: sequence motif"
GISWNSGRLGYADSVKG

SEQ ID NO: 603 - protein, 17 aa, Artificial Sequence
  source: /note="Description of Artificial Sequence: sequence motif"
ESSLGYCSGGSCSHFDY

SEQ ID NO: 604 - protein, 126 aa, Artificial Sequence
  source: /note="Description of Artificial Sequence: IL-17RA binding protein"
  MOD_RES (31)..(31): Any amino acid
QVQLVESGGGLVQPGRSLRLSCAASGFPFDXYAMHWVRQAPGKGLEWVSGISWNSGRLGYADSVKGRFTISRDNAKKSLHLQMNSLRAEDTAMYYCAKESSLGYCSGGSCSHFDYRGQGTLVTVSS

SEQ ID NO: 605 - protein, 5 aa, Artificial Sequence
  source: /note="Description of Artificial Sequence: sequence motif"
EYAMH

SEQ ID NO: 606 - protein, 17 aa, Artificial Sequence
  source: /note="Description of Artificial Sequence: sequence motif"
GISWNSGRLDYADSVKG

SEQ ID NO: 607 - protein, 17 aa, Artificial Sequence
  source: /note="Description of Artificial Sequence: sequence motif"
ESSLGYCSGGSCSHFDY

SEQ ID NO: 608 - protein, 126 aa, Artificial Sequence
  source: /note="Description of Artificial Sequence: IL-17RA binding protein"
QVQLVESGGGLVQPGRSLRLSCAASGFPFDEYAMHWVRQAPGKGLEWVSGISWNSGRLDYADSVKGRFTISRDNAKKSLHLQMNSLRAEDAAMYYCAKESSLGYCSGGSCSHFDYRGQGTLVTVSS

SEQ ID NO: 609 - protein, 5 aa, Artificial Sequence
  source: /note="Description of Artificial Sequence: sequence motif"
EYAMH

SEQ ID NO: 610 - protein, 17 aa, Artificial Sequence
  source: /note="Description of Artificial Sequence: sequence motif"
GISWNSGRLDYADSVKG

SEQ ID NO: 611 - protein, 17 aa, Artificial Sequence
  source: /note="Description of Artificial Sequence: sequence motif"
ESSLGYCSGGSCSHFDY

SEQ ID NO: 612 - protein, 126 aa, Artificial Sequence; identical to SEQ ID NO: 608
  source: /note="Description of Artificial Sequence: IL-17RA binding protein"

SEQ ID NO: 613 - protein, 5 aa, Artificial Sequence
  source: /note="Description of Artificial Sequence: sequence motif"
EYAMH

SEQ ID NO: 614 - protein, 17 aa, Artificial Sequence
  source: /note="Description of Artificial Sequence: sequence motif"
GISWNSGRLDYADSVKG

SEQ ID NO: 615 - protein, 17 aa, Artificial Sequence
  source: /note="Description of Artificial Sequence: sequence motif"
ESSLGYCSGGSCSHFDY

SEQ ID NO: 616 - protein, 126 aa, Artificial Sequence; identical to SEQ ID NO: 608
  source: /note="Description of Artificial Sequence: IL-17RA binding protein"

SEQ ID NO: 617 - protein, 5 aa, Artificial Sequence
  source: /note="Description of Artificial Sequence: sequence motif"
EYAMH

SEQ ID NO: 618 - protein, 17 aa, Artificial Sequence
  source: /note="Description of Artificial Sequence: sequence motif"
GISWNSGRQDYADSVKG

SEQ ID NO: 619 - protein, 17 aa, Artificial Sequence
  source: /note="Description of Artificial Sequence: sequence motif"
ETSLGYCSGGSCSHFDY

SEQ ID NO: 620 - protein, 126 aa, Artificial Sequence
  source: /note="Description of Artificial Sequence: IL-17RA binding protein"
EVQLVESGGGLVQPGRSLRLSCAASGFPFDEYAMHWVRQAPGKGLEWVSGISWNSGRQDYADSVKGRFTISRDNAKKSLHLQMNSLRAEDTAMYYCAKETSLGYCSGGSCSHFDYRGQGTLVTVSS

SEQ ID NO: 621 - protein, 5 aa, Artificial Sequence
  source: /note="Description of Artificial Sequence: sequence motif"
EYAMH

SEQ ID NO: 622 - protein, 17 aa, Artificial Sequence
  source: /note="Description of Artificial Sequence: sequence motif"
GISWNSGRLGYADSVKG

SEQ ID NO: 623 - protein, 17 aa, Artificial Sequence
  source: /note="Description of Artificial Sequence: sequence motif"
ESSLGYCSGGSCSHFDY

SEQ ID NO: 624 - protein, 126 aa, Artificial Sequence
  source: /note="Description of Artificial Sequence: IL-17RA binding protein"
EVQLVESGGGLVQPGRSLRLSCAASGFPFDEYAMHWVRQAPGKGLEWVSGISWNSGRLGYADSVKGRFTISRDNAKKSLHLQMNSLKTEDTAMYYCAKESSLGYCSGGSCSHFDYRGQGTLVTVSS

SEQ ID NO: 625 - protein, 5 aa, Artificial Sequence
  source: /note="Description of Artificial Sequence: sequence motif"
EYAMH

SEQ ID NO: 626 - protein, 17 aa, Artificial Sequence
  source: /note="Description of Artificial Sequence: sequence motif"
GISWNSGRLGYADSVKG

SEQ ID NO: 627 - protein, 17 aa, Artificial Sequence
  source: /note="Description of Artificial Sequence: sequence motif"
ESSLGYCSGGSCSHFDY

SEQ ID NO: 628 - protein, 126 aa, Artificial Sequence; identical to SEQ ID NO: 624
  source: /note="Description of Artificial Sequence: IL-17RA binding protein"

SEQ ID NO: 629 - protein, 5 aa, Artificial Sequence
  source: /note="Description of Artificial Sequence: sequence motif"
EYAMH

SEQ ID NO: 630 - protein, 17 aa, Artificial Sequence
  source: /note="Description of Artificial Sequence: sequence motif"
GISWNSGRLGYADSVKG

SEQ ID NO: 631 - protein, 17 aa, Artificial Sequence
  source: /note="Description of Artificial Sequence: sequence motif"
ESSLGYCSGGSCSHFDY

SEQ ID NO: 632 - protein, 126 aa, Artificial Sequence; identical to SEQ ID NO: 624
  source: /note="Description of Artificial Sequence: IL-17RA binding protein"

SEQ ID NO: 633 - protein, 5 aa, Artificial Sequence
  source: /note="Description of Artificial Sequence: sequence motif"
EYAMH

SEQ ID NO: 634 - protein, 17 aa, Artificial Sequence
  source: /note="Description of Artificial Sequence: sequence motif"
GISWNSGRLGYADSVKG

SEQ ID NO: 635 - protein, 17 aa, Artificial Sequence
  source: /note="Description of Artificial Sequence: sequence motif"
ESSLGYCSGGSCSHFDY

SEQ ID NO: 636 - protein, 126 aa, Artificial Sequence
  source: /note="Description of Artificial Sequence: IL-17RA binding protein"
QVQLVESGGGLVQPGRSLRLSCVASGFPFDEYAMHWVRQAPGKGLEWVSGISWNSGRLGYADSVKGRFTISRDNAKKSLHLQMNSLRVEDTAMYYCAKESSLGYCSGGSCSHFDYRGQGTLVTVSS

SEQ ID NO: 637 - protein, 5 aa, Artificial Sequence
  source: /note="Description of Artificial Sequence: sequence motif"
EYAMH

SEQ ID NO: 638 - protein, 17 aa, Artificial Sequence
  source: /note="Description of Artificial Sequence: sequence motif"
GISWNSGRLGYADSVKG

SEQ ID NO: 639 - protein, 17 aa, Artificial Sequence
  source: /note="Description of Artificial Sequence: sequence motif"
ESSLGYCSGGSCSHFDY

SEQ ID NO: 640 - protein, 126 aa, Artificial Sequence; identical to SEQ ID NO: 636
  source: /note="Description of Artificial Sequence: IL-17RA binding protein"

SEQ ID NO: 641 - protein, 5 aa, Artificial Sequence
  source: /note="Description of Artificial Sequence: sequence motif"
EYAMH

SEQ ID NO: 642 - protein, 17 aa, Artificial Sequence
  source: /note="Description of Artificial Sequence: sequence motif"
GISWNSGRLGYADSVKG

SEQ ID NO: 643 - protein, 17 aa, Artificial Sequence
  source: /note="Description of Artificial Sequence: sequence motif"
ESSLGYCSGGSCSHFDY

SEQ ID NO: 644 - protein, 126 aa, Artificial Sequence; identical to SEQ ID NO: 636
  source: /note="Description of Artificial Sequence: IL-17RA binding protein"

SEQ ID NO: 645 - protein, 5 aa, Artificial Sequence
  source: /note="Description of Artificial Sequence: sequence motif"
EYAMH

SEQ ID NO: 646 - protein, 17 aa, Artificial Sequence
  source: /note="Description of Artificial Sequence: sequence motif"
GISWNSGRLGYADSVKG

SEQ ID NO: 647 - protein, 17 aa, Artificial Sequence
  source: /note="Description of Artificial Sequence: sequence motif"
ESSLGYCSGGSCSHFDY

SEQ ID NO: 648 - protein, 126 aa, Artificial Sequence; identical to SEQ ID NO: 636
  source: /note="Description of Artificial Sequence: IL-17RA binding protein"

SEQ ID NO: 649 - protein, 5 aa, Artificial Sequence
  source: /note="Description of Artificial Sequence: sequence motif"
EYAMH

SEQ ID NO: 650 - protein, 17 aa, Artificial Sequence
  source: /note="Description of Artificial Sequence: sequence motif"
GISWNSGRLGYADSVKG

SEQ ID NO: 651 - protein, 17 aa, Artificial Sequence
  source: /note="Description of Artificial Sequence: sequence motif"
ESSLGYCSGGSCSHFDY

SEQ ID NO: 652 - protein, 126 aa, Artificial Sequence
  source: /note="Description of Artificial Sequence: IL-17RA binding protein"
QVQLVESGGGLVQPGRSLRLSCAASGFPFDEYAMHWARQAPGKGLEWVSGISWNSGRLGYADSVKGRFTISRDNAKKSLHLQMNSLKTEDTAMYYCAKESSLGYCSGGSCSHFDYRGQGTLVTVSS

SEQ ID NO: 653 - protein, 5 aa, Artificial Sequence
  source: /note="Description of Artificial Sequence: sequence motif"
EYAMH

SEQ ID NO: 654 - protein, 17 aa, Artificial Sequence
  source: /note="Description of Artificial Sequence: sequence motif"
GISWNSGRLGYADSVKG

SEQ ID NO: 655 - protein, 17 aa, Artificial Sequence
  source: /note="Description of Artificial Sequence: sequence motif"
ESSLGYCSGGSCSHFDY

SEQ ID NO: 656 - protein, 126 aa, Artificial Sequence; identical to SEQ ID NO: 652
  source: /note="Description of Artificial Sequence: IL-17RA binding protein"

SEQ ID NO: 657 - protein, 5 aa, Artificial Sequence
  source: /note="Description of Artificial Sequence: sequence motif"
EYAMH

SEQ ID NO: 658 - protein, 17 aa, Artificial Sequence
  source: /note="Description of Artificial Sequence: sequence motif"
GISWNSGRLGYADSVKG

SEQ ID NO: 659 - protein, 17 aa, Artificial Sequence
  source: /note="Description of Artificial Sequence: sequence motif"
ESSLGYCSGGSCSHFDY

SEQ ID NO: 660 - protein, 126 aa, Artificial Sequence; identical to SEQ ID NO: 652
  source: /note="Description of Artificial Sequence: IL-17RA binding protein"

SEQ ID NO: 661 - protein, 5 aa, Artificial Sequence
  source: /note="Description of Artificial Sequence: sequence motif"
EYAMH

SEQ ID NO: 662 - protein, 17 aa, Artificial Sequence
  source: /note="Description of Artificial Sequence: sequence motif"
GISWNSGRLGYADSVKG

SEQ ID NO: 663 - protein, 17 aa, Artificial Sequence
  source: /note="Description of Artificial Sequence: sequence motif"
ESSLGYCSGGSCSHFDY

SEQ ID NO: 664 - protein, 126 aa, Artificial Sequence
  source: /note="Description of Artificial Sequence: IL-17RA binding protein"
QVQLVESGGGLVQPGRSLRLSCAASGFPFDEYAMHWVRQAPGKGLEWVSGISWNSGRLGYADSVKGRFTISRDNAKKSLHLQMNSLKTEDTAMYYCAKESSLGYCSGGSCSHFDYRGQGTPVTVSS

SEQ ID NO: 665 - protein, 5 aa, Artificial Sequence
  source: /note="Description of Artificial Sequence: sequence motif"
EYAMH

SEQ ID NO: 666 - protein, 17 aa, Artificial Sequence
  source: /note="Description of Artificial Sequence: sequence motif"
GISWNSGRLGYADSVKG

SEQ ID NO: 667 - protein, 17 aa, Artificial Sequence
  source: /note="Description of Artificial Sequence: sequence motif"
ESSLGYCSGGSCSHFDY

SEQ ID NO: 668 - protein, 126 aa, Artificial Sequence; identical to SEQ ID NO: 664
  source: /note="Description of Artificial Sequence: IL-17RA binding protein"

SEQ ID NO: 669 - protein, 5 aa, Artificial Sequence
  source: /note="Description of Artificial Sequence: sequence motif"
EYAMH

SEQ ID NO: 670 - protein, 17 aa, Artificial Sequence
  source: /note="Description of Artificial Sequence: sequence motif"
GISWNSGRLGYADSVKG

SEQ ID NO: 671 - protein, 17 aa, Artificial Sequence
  source: /note="Description of Artificial Sequence: sequence motif"
ESSLGYCSGGSCSHFDY

SEQ ID NO: 672 - protein, 126 aa, Artificial Sequence; identical to SEQ ID NO: 664
  source: /note="Description of Artificial Sequence: IL-17RA binding protein"

SEQ ID NO: 673 - protein, 5 aa, Artificial Sequence
  source: /note="Description of Artificial Sequence: sequence motif"
EYAMH

SEQ ID NO: 674 - protein, 17 aa, Artificial Sequence
  source: /note="Description of Artificial Sequence: sequence motif"
GISWNSGRLGYADSVKG

SEQ ID NO: 675 - protein, 17 aa, Artificial Sequence
  source: /note="Description of Artificial Sequence: sequence motif"
ESSLGYCNGGTCSHFDY

SEQ ID NO: 676 - protein, 126 aa, Artificial Sequence
  source: /note="Description of Artificial Sequence: IL-17RA binding protein"
QVQLVESGGGLVQPGRSLRLSCAASGFPFDEYAMHWVRQAPGKGLEWVSGISWNSGRLGYADSVKGRFTISRDNAKKSLHLQMNSLSAEDTAMYYCAKESSLGYCNGGTCSHFDYRGQGTLVTVSS

SEQ ID NO: 677 - protein, 5 aa, Artificial Sequence
  source: /note="Description of Artificial Sequence: sequence motif"
DYAMH

SEQ ID NO: 678 - protein, 17 aa, Artificial Sequence
  source: /note="Description of Artificial Sequence: sequence motif"
GISWNGGRLDYADSVKG

SEQ ID NO: 679 - protein, 17 aa, Artificial Sequence
  source: /note="Description of Artificial Sequence: sequence motif"
ESSLGYCSGGSCSHFDY

SEQ ID NO: 680 - protein, 126 aa, Artificial Sequence
  source: /note="Description of Artificial Sequence: IL-17RA binding protein"
QVQLVESGGGLVQPGRSLRLSCAASGFTFDDYAMHWVRQAPGKGLEWVSGISWNGGRLDYADSVKGRFTISRDNAKKSLHLQMNSLRAEDTAMYYCAKESSLGYCSGGSCSHFDYRGQGTLVTVSS

SEQ ID NO: 681 - protein, 5 aa, Artificial Sequence
  source: /note="Description of Artificial Sequence: sequence motif"
DYAMH

SEQ ID NO: 682 - protein, 17 aa, Artificial Sequence
  source: /note="Description of Artificial Sequence: sequence motif"
GISWNSGRKGYADSVKG

SEQ ID NO: 683 - protein, 17 aa, Artificial Sequence
  source: /note="Description of Artificial Sequence: sequence motif"
EEGLGYCSGGSCSTFDY

SEQ ID NO: 684 - protein, 126 aa, Artificial Sequence
  source: /note="Description of Artificial Sequence: IL-17RA binding protein"
EVQLVESGGGLVQPGGSLRLSCAASGFTFDDYAMHWVRQAPGKGLEWVAGISWNSGRKGYADSVKGRFTISRDNAKNSLYLQMNSLRSEDTALYYCAKEEGLGYCSGGSCSTFDYRGQGTLVTVSS

SEQ ID NO: 685 - protein, 5 aa, Artificial Sequence
  source: /note="Description of Artificial Sequence: sequence motif"
DYAMH

SEQ ID NO: 686 - protein, 17 aa, Artificial Sequence
  source: /note="Description of Artificial Sequence: sequence motif"
GISWNSGRIGYADSVKG

SEQ ID NO: 687 - protein, 17 aa, Artificial Sequence
  source: /note="Description of Artificial Sequence: sequence motif"
EEGLGYCSGGSCSTFDQ

SEQ ID NO: 688 - protein, 126 aa, Artificial Sequence
  source: /note="Description of Artificial Sequence: IL-17RA binding protein"
EVQLVESGGGLVKPGGSLRLSCAASGFTFDDYAMHWVRQAPGKGLEWVSGISWNSGRIGYADSVKGRFTISRDNARNSLYLQMNSLRAEDTALYYCAKEEGLGYCSGGSCSTFDQRGQGTLVTVSS

SEQ ID NO: 689 - protein, 5 aa, Artificial Sequence
  source: /note="Description of Artificial Sequence: sequence motif"
DYAMH

SEQ ID NO: 690 - protein, 17 aa, Artificial Sequence
  source: /note="Description of Artificial Sequence: sequence motif"
GISWNSGSTGYADSVKG

SEQ ID NO: 691 - protein, 17 aa, Artificial Sequence
  source: /note="Description of Artificial Sequence: sequence motif"
EEGLGYCRGGSCSTFDY

SEQ ID NO: 692 - protein, 126 aa, Artificial Sequence
  source: /note="Description of Artificial Sequence: IL-17RA binding protein"
QVQLVESGGGLVQPGRSLKLSCAASGFTFADYAMHWVRQAPGKGLEWVSGISWNSGSTGYADSVKGRFTISRDNAKNSLYLQMNSLRAEDTALYYCAKEEGLGYCRGGSCSTFDYRGQGTLVTVSS

SEQ ID NO: 693 - protein, 5 aa, Artificial Sequence
  source: /note="Description of Artificial Sequence: sequence motif"
DYSMH

SEQ ID NO: 694 - protein, 17 aa, Artificial Sequence
  source: /note="Description of Artificial Sequence: sequence motif"
GISWNSGRMGYADSVRG

SEQ ID NO: 695 - protein, 17 aa, Artificial Sequence
  source: /note="Description of Artificial Sequence: sequence motif"
DRGLGYCHGGSCSSFDY

SEQ ID NO: 696 - protein, 126 aa, Artificial Sequence
  source: /note="Description of Artificial Sequence: IL-17RA binding protein"
EVQLVESGGGLVQPGRSLRLSCEASGFTFDDYSMHWVRQAPGKGLEWVSGISWNSGRMGYADSVRGRFTISRDNAKNSLYLQMNSLRPEDTALYYCAKDRGLGYCHGGSCSSFDYWGQGTLVTVSS

SEQ ID NO: 697 - protein, 5 aa, Artificial Sequence
  source: /note="Description of Artificial Sequence: sequence motif"
DYAMH

SEQ ID NO: 698 - protein, 17 aa, Artificial Sequence
  source: /note="Description of Artificial Sequence: sequence motif"
GISWNSGRKDYADSVKG

SEQ ID NO: 699 - protein, 17 aa, Artificial Sequence
  source: /note="Description of Artificial Sequence: sequence motif"
EEGLGYCSGGSCSTFDQ

SEQ ID NO: 700 - protein, 126 aa, Artificial Sequence
  source: /note="Description of Artificial Sequence: IL-17RA binding protein"
EVQLVESGGGLVQPGRSLRLSCAASGFTFADYAMHWVRQVPGKGLEWVSGISWNSGRKDYADSVKGRFTISRDNGKNSLYLQMNSLRAEDTAMYYCAKEEGLGYCSGGSCSTFDQRGQGTLVTVSS

SEQ ID NO: 701 - protein, 5 aa, Artificial Sequence
  source: /note="Description of Artificial Sequence: sequence motif"
DYAMH

SEQ ID NO: 702 - protein, 17 aa, Artificial Sequence
  source: /note="Description of Artificial Sequence: sequence motif"
GISWNSGRKDYADSVKG

SEQ ID NO: 703 - protein, 17 aa, Artificial Sequence
  source: /note="Description of Artificial Sequence: sequence motif"
EEGLGYCSGGSCSTFDQ

SEQ ID NO: 704 - protein, 126 aa, Artificial Sequence
  source: /note="Description of Artificial Sequence: IL-17RA binding protein"
EVQLVESGGGLVQPGGSLRLSCAASGFTFDDYAMHWVRQVPGKGLEWVSGISWNSGRKDYADSVKGRFTISRDNGKNSLYLQMNSLRAEDTAMYYCAKEEGLGYCSGGSCSTFDQRGQGTLVTVSS

SEQ ID NO: 705 - protein, 5 aa, Artificial Sequence
  source: /note="Description of Artificial Sequence: sequence motif"
DYAMH

SEQ ID NO: 706 - protein, 17 aa, Artificial Sequence
  source: /note="Description of Artificial Sequence: sequence motif"
GISWNSGTKDYADSVKG

SEQ ID NO: 707 - protein, 17 aa, Artificial Sequence
  source: /note="Description of Artificial Sequence: sequence motif"
EPSLGFCRGGSCSSFDY

SEQ ID NO: 708 - protein, 126 aa, Artificial Sequence
  source: /note="Description of Artificial Sequence: IL-17RA binding protein"
EVQLVESGGGLVQPGRSLRLSCAASGFTFDDYAMHWIRQTPGKGLEWVSGISWNSGTKDYADSVKGRFTISRDNAKNSLYLQMNSLRVEDTAVYHCAKEPSLGFCRGGSCSSFDYWGQGTLVTVSS

SEQ ID NO: 709 - protein, 5 aa, Artificial Sequence
  source: /note="Description of Artificial Sequence: sequence motif"
DYAMH

SEQ ID NO: 710 - protein, 17 aa, Artificial Sequence
  source: /note="Description of Artificial Sequence: sequence motif"
GISWNSGTKDYADSVKG

SEQ ID NO: 711 - protein, 17 aa, Artificial Sequence
  source: /note="Description of Artificial Sequence: sequence motif"
EPSLGFCRGGSCSSFDY

SEQ ID NO: 712 - protein, 126 aa, Artificial Sequence; identical to SEQ ID NO: 708
  source: /note="Description of Artificial Sequence: IL-17RA binding protein"

SEQ ID NO: 713 - protein, 5 aa, Artificial Sequence
  source: /note="Description of Artificial Sequence: sequence motif"
DYAMH

SEQ ID NO: 714 - protein, 17 aa, Artificial Sequence
  source: /note="Description of Artificial Sequence: sequence motif"
GISWNSGTKDYADSVKG

SEQ ID NO: 715 - protein, 17 aa, Artificial Sequence
  source: /note="Description of Artificial Sequence: sequence motif"
EPSLGFCRGGSCSSFDY

SEQ ID NO: 716 - protein, 126 aa, Artificial Sequence; identical to SEQ ID NO: 708
  source: /note="Description of Artificial Sequence: IL-17RA binding protein"

SEQ ID NO: 717 - protein, 5 aa, Artificial Sequence
  source: /note="Description of Artificial Sequence: sequence motif"
DYAMH

SEQ ID NO: 718 - protein, 17 aa, Artificial Sequence
  source: /note="Description of Artificial Sequence: sequence motif"
GISWNSGTKDYADSVKG

SEQ ID NO: 719 - protein, 17 aa, Artificial Sequence
  source: /note="Description of Artificial Sequence: sequence motif"
ESSLGYCRGGSCSSFDY

SEQ ID NO: 720 - protein, 126 aa, Artificial Sequence
  source: /note="Description of Artificial Sequence: IL-17RA binding protein"
EVQLVESGGGLVQPGRSLRLSCAASGFTFDDYAMHWVRQAPGKGLEWVSGISWNSGTKDYADSVKGRFTTSRDNAKNSLYLQMNSLRPEDTAVYHCAKESSLGYCRGGSCSSFDYWGRGTLVTVSS

SEQ ID NO: 721 - protein, 5 aa, Artificial Sequence
  source: /note="Description of Artificial Sequence: sequence motif"
DYAMH

SEQ ID NO: 722 - protein, 17 aa, Artificial Sequence
  source: /note="Description of Artificial Sequence: sequence motif"
GISWNSGTKDYADSVKG

SEQ ID NO: 723 - protein, 17 aa, Artificial Sequence
  source: /note="Description of Artificial Sequence: sequence motif"
ESSLGYCRGGSCSSFDY

SEQ ID NO: 724 - protein, 126 aa, Artificial Sequence; identical to SEQ ID NO: 720
  source: /note="Description of Artificial Sequence: IL-17RA binding protein"

SEQ ID NO: 725 - protein, 5 aa, Artificial Sequence
  source: /note="Description of Artificial Sequence: sequence motif"
DYTMH

SEQ ID NO: 726 - protein, 17 aa, Artificial Sequence
  source: /note="Description of Artificial Sequence: sequence motif"
GISWNSGRMDYADSVKG

SEQ ID NO: 727 - protein, 17 aa, Artificial Sequence
  source: /note="Description of Artificial Sequence: sequence motif"
DKGLGYCSGGSCSNFDY

SEQ ID NO: 728 - protein, 126 aa, Artificial Sequence
  source: /note="Description of Artificial Sequence: IL-17RA binding protein"
EVQLVESGBGSVQPGRSLRLSCAASGFTFDDYTMHWVRQAPGKGLEWVSGISWNSGRMDYADSVKGRFTISRDNAKNSLYLQMNSLRPEDTALYYCAKDKGLGYCSGGSCSNFDYWGQGTLVTVSS

SEQ ID NO: 729 - protein, 5 aa, Artificial Sequence
  source: /note="Description of Artificial Sequence: sequence motif"
DYAMY

SEQ ID NO: 730 - protein, 17 aa, Artificial Sequence
  source: /note="Description of Artificial Sequence: sequence motif"
GISWNGGTKDYADSVKG

SEQ ID NO: 731 - protein, 17 aa, Artificial Sequence
  source: /note="Description of Artificial Sequence: sequence motif"
DQGLGFCRGGSCSHFDY

SEQ ID NO: 732 - protein, 126 aa, Artificial Sequence
  source: /note="Description of Artificial Sequence: IL-17RA binding protein"
QVQLVESGGGLVQPGRSLRLSCAASGFTFDDYAMYWVRQAPGKGQEWVSGISWNGGTKDYADSVKGRFTISRDNAKNSLYLQMNSLRPEDTALYYCAKDQGLGFCRGGSCSHFDYWGQGTLVTVSS

SEQ ID NO: 733 - protein, 5 aa, Artificial Sequence
  source: /note="Description of Artificial Sequence: sequence motif"
DYAMH

SEQ ID NO: 734 - protein, 17 aa, Artificial Sequence
  source: /note="Description of Artificial Sequence: sequence motif"
GISWNGGTKDYADSVKG

SEQ ID NO: 735 - protein, 17 aa, Artificial Sequence
  source: /note="Description of Artificial Sequence: sequence motif"
DQGLGFCRGGSCSHFDY

SEQ ID NO: 736 - protein, 126 aa, Artificial Sequence
  source: /note="Description of Artificial Sequence: IL-17RA binding protein"
QVQLVESGGGLVQPGRSLRLSCAASGFTFDDYAMHWVRQAPGKGQEWVSGISWNGGTKDYADSVKGRFTISRDNAKNSLYLQMNSLRPEDTALYYCAKDQGLGFCRGGSCSHFDYWGQGTLVTVSS

SEQ ID NO: 737 - protein, 5 aa, Artificial Sequence
  source: /note="Description of Artificial Sequence: sequence motif"
EYAMH

SEQ ID NO: 738 - protein, 17 aa, Artificial Sequence
  source: /note="Description of Artificial Sequence: sequence motif"
GISWNGGTKDYADSVKG

SEQ ID NO: 739 - protein, 17 aa, Artificial Sequence
  source: /note="Description of Artificial Sequence: sequence motif"
DQGLGFCRGGSCSHFDY

SEQ ID NO: 740 - protein, 126 aa, Artificial Sequence
  source: /note="Description of Artificial Sequence: IL-17RA binding protein"
QVQLVESGGGLVQPGRSLRLSCAASGFTFDEYAMHWVRQAPGKGQEWVSGISWNGGTKDYADSVKGRFTISRDNAKNSLYLQMNSLRPEDTALYYCAKDQGLGFCRGGSCSHFDYWGQGTLVTVSS

SEQ ID NO: 741 - protein, 5 aa, Artificial Sequence
  source: /note="Description of Artificial Sequence: sequence motif"
EYAMH

SEQ ID NO: 742 - protein, 17 aa, Artificial Sequence
  source: /note="Description of Artificial Sequence: sequence motif"
GISWNGGTKDYADSVKG

SEQ ID NO: 743 - protein, 17 aa, Artificial Sequence
  source: /note="Description of Artificial Sequence: sequence motif"
DQGLGFCRGGSCSHFDY

SEQ ID NO: 744 - protein, 126 aa, Artificial Sequence; identical to SEQ ID NO: 740
  source: /note="Description of Artificial Sequence: IL-17RA binding protein"

SEQ ID NO: 745 - protein, 5 aa, Artificial Sequence
  source: /note="Description of Artificial Sequence: sequence motif"
DYAMH

SEQ ID NO: 746 - protein, 17 aa, Artificial Sequence
  source: /note="Description of Artificial Sequence: sequence motif"
GISWNGGTKDYADSVKG

SEQ ID NO: 747 - protein, 17 aa, Artificial Sequence
  source: /note="Description of Artificial Sequence: sequence motif"
DQGLGFCRGGSCSHFDY

SEQ ID NO: 748 - protein, 126 aa, Artificial Sequence
  source: /note="Description of Artificial Sequence: IL-17RA binding protein"
QVQLVESGGGLVQPGRSLRLSCAASGFTFDDYAMHWVRQAPGKGLEWVSGISWNGGTKDYADSVKGRFTISRDNAKNSLYLQMNSLRPEDTALYYCAKDQGLGFCRGGSCSHFDYWGQGTLVTVSS

SEQ ID NO: 749 - protein, 5 aa, Artificial Sequence
  source: /note="Description of Artificial Sequence: sequence motif"
DYAMH

SEQ ID NO: 750 - protein, 17 aa, Artificial Sequence
  source: /note="Description of Artificial Sequence: sequence motif"
GISWNGGTKDYADSVKG

SEQ ID NO: 751 - protein, 17 aa, Artificial Sequence
  source: /note="Description of Artificial Sequence: sequence motif"
DQGLGYCRGGSCSHFDY

SEQ ID NO: 752 - protein, 126 aa, Artificial Sequence
  source: /note="Description of Artificial Sequence: IL-17RA binding protein"
QVQLVESGGGLVQPGRSLRLSCAASGFTFDDYAMHWVRQAPGKGQEWVSGISWNGGTKDYADSVKGRFTISRDNAKNSLYLQMNSLRPEDTALYYCAKDQGLGYCRGGSCSHFDYWGQGTLVTVSS

SEQ ID NO: 753 - protein, 5 aa, Artificial Sequence
  source: /note="Description of Artificial Sequence: sequence motif"
DYAMH

SEQ ID NO: 754 - protein, 17 aa, Artificial Sequence
  source: /note="Description of Artificial Sequence: sequence motif"
GISWNGGTKDYADSVKG

SEQ ID NO: 755 - protein, 17 aa, Artificial Sequence
  source: /note="Description of Artificial Sequence: sequence motif"
DQGLGYCRGGSCSHFDY

SEQ ID NO: 756 - protein, 126 aa, Artificial Sequence; identical to SEQ ID NO: 752
  source: /note="Description of Artificial Sequence: IL-17RA binding protein"

SEQ ID NO: 757 - protein, 5 aa, Artificial Sequence
  source: /note="Description of Artificial Sequence: sequence motif"
EYAMH

SEQ ID NO: 758 - protein, 17 aa, Artificial Sequence
  source: /note="Description of Artificial Sequence: sequence motif"
GISWNGGTKDYADSVKG

SEQ ID NO: 759 - protein, 17 aa, Artificial Sequence
  source: /note="Description of Artificial Sequence: sequence motif"
DQGLGFCRGGGCSHFDY

SEQ ID NO: 760 - protein, 126 aa, Artificial Sequence
  source: /note="Description of Artificial Sequence: IL-17RA binding protein"
EVQLVESGGGLVQPGRSLRLSCAASGFTFDEYAMHWVRQAPGKGQEWVSGISWNGGTKDYADSVKGRFTISRDNAKNSLYLQMNSLRPEDTALYYCAKDQGLGFCRGGGCSHFDYWGQGTLVTVSS

SEQ ID NO: 761 - protein, 5 aa, Artificial Sequence
  source: /note="Description of Artificial Sequence: sequence motif"
EYAMH

SEQ ID NO: 762 - protein, 17 aa, Artificial Sequence
  source: /note="Description of Artificial Sequence: sequence motif"
GISWNGGTKDYADSVKG

SEQ ID NO: 763 - protein, 17 aa, Artificial Sequence
  source: /note="Description of Artificial Sequence: sequence motif"
DQGLGFCRGGGCSHFDY

SEQ ID NO: 764 - protein, 126 aa, Artificial Sequence; identical to SEQ ID NO: 760
  source: /note="Description of Artificial Sequence: IL-17RA binding protein"

SEQ ID NO: 765 - protein, 5 aa, Artificial Sequence
  source: /note="Description of Artificial Sequence: sequence motif"
DYAMH

SEQ ID NO: 766 - protein, 17 aa, Artificial Sequence
  source: /note="Description of Artificial Sequence: sequence motif"
GISWNSGSKGYADSVKG

SEQ ID NO: 767 - protein, 17 aa, Artificial Sequence
  source: /note="Description of Artificial Sequence: sequence motif"
DQGLGFCRGGSCSHFDY

SEQ ID NO: 768 - protein, 126 aa, Artificial Sequence
  source: /note="Description of Artificial Sequence: IL-17RA binding protein"
QVQLVESGGGLVQPGRSLRLSCAASGFTFDDYAMHWVRQAPGKGLEWVSGISWNSGSKGYADSVKGRFTISRDNAKNSLYLQMNSLRPEDTALYYCAKDQGLGFCRGGSCSHFDYWGQGTLVTVSS

SEQ ID NO: 769 - protein, 5 aa, Artificial Sequence
  source: /note="Description of Artificial Sequence: sequence motif"
DYAMH

SEQ ID NO: 770 - protein, 17 aa, Artificial Sequence
  source: /note="Description of Artificial Sequence: sequence motif"
GISWNGGTIDYADSVKG

SEQ ID NO: 771 - protein, 17 aa, Artificial Sequence
  source: /note="Description of Artificial Sequence: sequence motif"
EEGLGFCRGGSCSTFDY

SEQ ID NO: 772 - protein, 126 aa, Artificial Sequence
  source: /note="Description of Artificial Sequence: IL-17RA binding protein"
QVQLVESGGGLVQPGRSLRLSCAASGFTFDDYAMHWVRQGPGKGLEWVSGISWNGGTIDYADSVKGRFTISRDNAKNSLYLQMNSLRPEDTALYYCAKEEGLGFCRGGSCSTFDYWGQGTLVTVSS

SEQ ID NO: 773 - protein, 5 aa, Artificial Sequence
  source: /note="Description of Artificial Sequence: sequence motif"
DYAMH

SEQ ID NO: 774 - protein, 17 aa, Artificial Sequence
  source: /note="Description of Artificial Sequence: sequence motif"
GISWNGGTIDYADSVKG

SEQ ID NO: 775 - protein, 17 aa, Artificial Sequence
  source: /note="Description of Artificial Sequence: sequence motif"
EEGLGFCRGGSCSTFDY

SEQ ID NO: 776 - protein, 126 aa, Artificial Sequence; identical to SEQ ID NO: 772
  source: /note="Description of Artificial Sequence: IL-17RA binding protein"

SEQ ID NO: 777 - protein, 5 aa, Artificial Sequence
  source: /note="Description of Artificial Sequence: sequence motif"
DYAMH

SEQ ID NO: 778 - protein, 17 aa, Artificial Sequence
  source: /note="Description of Artificial Sequence: sequence motif"
GISWNSGTMDYADSVKG

SEQ ID NO: 779 - protein, 17 aa, Artificial Sequence
  source: /note="Description of Artificial Sequence: sequence motif"
DSSIGYCRGGSCSNFDY

SEQ ID NO: 780 - protein, 126 aa, Artificial Sequence
  source: /note="Description of Artificial Sequence: IL-17RA binding protein"
QVQLVESGGGLVQPGRSLRLSCAASGFTFDDYAMHWVRQAPGKGLEWVSGISWNSGTMDYADSVKGRFTISRDNVKNSLYLQMNSLRAEDTALYFCAKDSSIGYCRGGSCSNFDYWGQGTLVTVSS

SEQ ID NO: 781 - protein, 5 aa, Artificial Sequence
  source: /note="Description of Artificial Sequence: sequence motif"
DYAMH

SEQ ID NO: 782 - protein, 17 aa, Artificial Sequence
  source: /note="Description of Artificial Sequence: sequence motif"
GISWNSGTMDYADSVKG

SEQ ID NO: 783 - protein, 17 aa, Artificial Sequence
  source: /note="Description of Artificial Sequence: sequence motif"
DSSIGYCRGGSCSNFDY

SEQ ID NO: 784 - protein, 126 aa, Artificial Sequence; identical to SEQ ID NO: 780
  source: /note="Description of Artificial Sequence: IL-17RA binding protein"

SEQ ID NO: 785 - protein, 5 aa, Artificial Sequence
  source: /note="Description of Artificial Sequence: sequence motif"
DYAMH

SEQ ID NO: 786 - protein, 17 aa, Artificial Sequence
  source: /note="Description of Artificial Sequence: sequence motif"
GISWNSGRRDYADSVKG

SEQ ID NO: 787 - protein, 17 aa, Artificial Sequence
  source: /note="Description of Artificial Sequence: sequence motif"
DRAIGYCSGGSCSDFDY

SEQ ID NO: 788 - protein, 126 aa, Artificial Sequence
  source: /note="Description of Artificial Sequence: IL-17RA binding protein"
EVQLVESGGGLVQPGRSLRLSCVASGFAFADYAMHWVRQAPGKGLEWVSGISWNSGRRDYADSVKGRFTISRDNAKNSLYLQMNSLRAEDTALYYCAKDRAIGYCSGGSCSDFDYRGQGTLVTVSS

SEQ ID NO: 789 - protein, 5 aa, Artificial Sequence
  source: /note="Description of Artificial Sequence: sequence motif"
DYAMH

SEQ ID NO: 790 - protein, 17 aa, Artificial Sequence
  source: /note="Description of Artificial Sequence: sequence motif"
GISWNSGRRDYADSVKG

SEQ ID NO: 791 - protein, 17 aa, Artificial Sequence
  source: /note="Description of Artificial Sequence: sequence motif"
DRAIGYCSGGSCSDFDY

SEQ ID NO: 792 - protein, 126 aa, Artificial Sequence; identical to SEQ ID NO: 788
  source: /note="Description of Artificial Sequence: IL-17RA binding protein"

SEQ ID NO: 793 - protein, 5 aa, Artificial Sequence
  source: /note="Description of Artificial Sequence: sequence motif"
DYAMH

SEQ ID NO: 794 - protein, 17 aa, Artificial Sequence
  source: /note="Description of Artificial Sequence: sequence motif"
GISWNSGSIGYADSVKG

SEQ ID NO: 795 - protein, 17 aa, Artificial Sequence
  source: /note="Description of Artificial Sequence: sequence motif"
EKGLGYCSGGTCGDLDN

SEQ ID NO: 796 - protein, 126 aa, Artificial Sequence
  source: /note="Description of Artificial Sequence: IL-17RA binding protein"
QVQLVESGGGLVQPGRSLRLSCAASGFTFDDYAMHWVRQAPGKGLEWVSGISWNSGSIGYADSVKGRFTISRDNAKNSLYLQMNSLRAEDTALYYCAKEKGLGYCSGGTCGDLDNWGQGTLVTVSS

SEQ ID NO: 797 - protein, 5 aa, Artificial Sequence
  source: /note="Description of Artificial Sequence: sequence motif"
DYAMH

SEQ ID NO: 798 - protein, 17 aa, Artificial Sequence
  source: /note="Description of Artificial Sequence: sequence motif"
GISWNSGRRGYADSVBG

SEQ ID NO: 799 - protein, 17 aa, Artificial Sequence
  source: /note="Description of Artificial Sequence: sequence motif"
ESSLGYCDGGSCSSFDH

SEQ ID NO: 800 - protein, 126 aa, Artificial Sequence
  source: /note="Description of Artificial Sequence: IL-17RA binding protein"
EVQLVESGGGLVQPGRSLRLSCAASGFTFDDYAMHWVRQAPGKGLEWVSGISWNSGRRGYADSVBGRFTISRDNAKNSLYLEMNSLRVEDTALYYCAKESSLGYCDGGSCSSFDHWGQGTLVTVSS

SEQ ID NO: 801 - protein, 5 aa, Artificial Sequence
  source: /note="Description of Artificial Sequence: sequence motif"
DYAMH

SEQ ID NO: 802 - protein, 17 aa, Artificial Sequence
  source: /note="Description of Artificial Sequence: sequence motif"
GISWNSGRRGYADSVBG

SEQ ID NO: 803 - protein, 17 aa, Artificial Sequence
  source: /note="Description of Artificial Sequence: sequence motif"
ESSLGYCDGGSCSSFDH

SEQ ID NO: 804 - protein, 126 aa, Artificial Sequence; identical to SEQ ID NO: 800
  source: /note="Description of Artificial Sequence: IL-17RA binding protein"

SEQ ID NO: 805 - protein, 5 aa, Artificial Sequence
  source: /note="Description of Artificial Sequence: sequence motif"
DYAMH

SEQ ID NO: 806 - protein, 17 aa, Artificial Sequence
  source: /note="Description of Artificial Sequence: sequence motif"
GISWNSGRKDYADSVKG

SEQ ID NO: 807 - protein, 17 aa, Artificial Sequence
  source: /note="Description of Artificial Sequence: sequence motif"
DSSIGYCRGGSCSNFDY

SEQ ID NO: 808 - protein, 126 aa, Artificial Sequence
  source: /note="Description of Artificial Sequence: IL-17RA binding protein"
EVQLVESGGGLVQPGRSLRLSCAASGFAFDDYAMHWVRQAPGKGLEWVSGISWNSGRKDYADSVKGRFTISRDNAKNSLYLQMNSLRTEDTALYYCAKDSSIGYCRGGSCSNFDYWGQGTRVTVSS

SEQ ID NO: 809 - protein, 5 aa, Artificial Sequence
  source: /note="Description of Artificial Sequence: sequence motif"
DFAMH

SEQ ID NO: 810 - protein, 17 aa, Artificial Sequence
  source: /note="Description of Artificial Sequence: sequence motif"
GISWNSGRMDYADSVKG

SEQ ID NO: 811 - protein, 17 aa, Artificial Sequence
  source: /note="Description of Artificial Sequence: sequence motif"
ESSLGYCTGGSCSHFDY

SEQ ID NO: 812 - protein, 126 aa, Artificial Sequence
  source: /note="Description of Artificial Sequence: IL-17RA binding protein"
QVQLVESGGGLVQPGRSLRLSCAASGFTFDDFAMHWVRQAPGKGLEWVSGISWNSGRMDYADSVKGRFTISRDNAKNSLFLQMTSLRVEDTALYFCAKESSLGYCTGGSCSHFDYWGQGTLVTVSS

SEQ ID NO: 813 - protein, 5 aa, Artificial Sequence
  source: /note="Description of Artificial Sequence: sequence motif"
DFAMH

SEQ ID NO: 814 - protein, 17 aa, Artificial Sequence
  source: /note="Description of Artificial Sequence: sequence motif"
GISWNSGRMDYADSVKG

SEQ ID NO: 815 - protein, 17 aa, Artificial Sequence
  source: /note="Description of Artificial Sequence: sequence motif"
ESSLGYCTGGSCSHFDY

SEQ ID NO: 816 - protein, 126 aa, Artificial Sequence; identical to SEQ ID NO: 812
  source: /note="Description of Artificial Sequence: IL-17RA binding protein"

SEQ ID NO: 817 - protein, 5 aa, Artificial Sequence
  source: /note="Description of Artificial Sequence: sequence motif"
DFAMH

SEQ ID NO: 818 - protein, 17 aa, Artificial Sequence
  source: /note="Description of Artificial Sequence: sequence motif"
GISWNSGRMDYADSVKG

SEQ ID NO: 819 - protein, 17 aa, Artificial Sequence
  source: /note="Description of Artificial Sequence: sequence motif"
ESSLGYCTGGSCSHFDY

SEQ ID NO: 820 - protein, 126 aa, Artificial Sequence
  source: /note="Description of Artificial Sequence: IL-17RA binding protein"
EVQLVESGGGLVKPGGSLRLSCAASGFTFDDFAMHWVRQAPGKGLEWVSGISWNSGRMDYADSVKGRFTISRDNAKNSLFLQMTSLRVEDTALYFCAKESSLGYCTGGSCSHFDYWGQGTLVTVSS

SEQ ID NO: 821 - protein, 5 aa, Artificial Sequence
  source: /note="Description of Artificial Sequence: sequence motif"
DYAMH

SEQ ID NO: 822 - protein, 17 aa, Artificial Sequence
  source: /note="Description of Artificial Sequence: sequence motif"
GISWNGGNIDYTDSVKG

SEQ ID NO: 823 - protein, 17 aa, Artificial Sequence
  source: /note="Description of Artificial Sequence: sequence motif"
DKGLGYCRGGSCSSFDY

SEQ ID NO: 824 - protein, 126 aa, Artificial Sequence
  source: /note="Description of Artificial Sequence: IL-17RA binding protein"
QVQLVESGGGLVQPGRSLRLSCAASGFTFDDYAMHWVRQAPGKGLEWVSGISWNGGNIDYTDSVKGRFTISRDNAKNSLFLQMNSLRAEDTALYFCAKDKGLGYCRGGSCSSFDYWGQGTLVTVSS

SEQ ID NO: 825 - protein, 5 aa, Artificial Sequence
  source: /note="Description of Artificial Sequence: sequence motif"
EYAMH

SEQ ID NO: 826 - protein, 17 aa, Artificial Sequence
  source: /note="Description of Artificial Sequence: sequence motif"
GISWNGNRMDYVDSVKG

SEQ ID NO: 827 - protein, 17 aa, Artificial Sequence
  source: /note="Description of Artificial Sequence: sequence motif"
DKGLGYCSGGSCSDFDY

SEQ ID NO: 828 - protein, 126 aa, Artificial Sequence
  source: /note="Description of Artificial Sequence: IL-17RA binding protein"
EVQLVESGGGLVQPGRSLRLSCAASGFTFDEYAMHWVRQAPGKGLEWVSGISWNGNRMDYVDSVKGRFTISRDNAKNSLYLQMNSLRAEDTAVYFCAKDKGLGYCSGGSCSDFDYWGQGTLVTVSS

SEQ ID NO: 829 - protein, 5 aa, Artificial Sequence
  source: /note="Description of Artificial Sequence: sequence motif"
DYAMH

SEQ ID NO: 830 - protein, 17 aa, Artificial Sequence
  source: /note="Description of Artificial Sequence: sequence motif"
GISWNSGRRDYADSVKG

SEQ ID NO: 831 - protein, 17 aa, Artificial Sequence
  source: /note="Description of Artificial Sequence: sequence motif"
ETGLGYCSGGGCSDFDY

SEQ ID NO: 832 - protein, 126 aa, Artificial Sequence
  source: /note="Description of Artificial Sequence: IL-17RA binding protein"
EVQLVESGGGLVQPGRSLRLSCAASGFTFDDYAMHWVRQAPGKGLEWVSGISWNSGRRDYADSVKGRFTISRDNAKNSLYLQMNSLRVEDTALYYCVKETGLGYCSGGGCSDFDYRGQGTLVTVSS

SEQ ID NO: 833 - protein, 5 aa, Artificial Sequence
  source: /note="Description of Artificial Sequence: sequence motif"
DYAMH

SEQ ID NO: 834 - protein, 17 aa, Artificial Sequence
  source: /note="Description of Artificial Sequence: sequence motif"
GISWNSGSIDYADSVKG

SEQ ID NO: 835 - protein, 17 aa, Artificial Sequence
  source: /note="Description of Artificial Sequence: sequence motif"
EKSLGFCRGGSCSGFDI

SEQ ID NO: 836 - protein, 126 aa, Artificial Sequence
  source: /note="Description of Artificial Sequence: IL-17RA binding protein"
QVQLVESGGGLVQPGRSLRLSCAASGFTFDDYAMHWVRQAPGKGLEWVSGISWNSGSIDYADSVKGRFSISRDNAKNSLYLQMNSLRPEDTALYYCAKEKSLGFCRGGSCSGFDIWGQGTMVTVSS

SEQ ID NO: 837 - protein, 5 aa, Artificial Sequence
  source: /note="Description of Artificial Sequence: sequence motif"
DYAMH

SEQ ID NO: 838 - protein, 17 aa, Artificial Sequence
  source: /note="Description of Artificial Sequence: sequence motif"
GISWNGGSIDYADSVKG

SEQ ID NO: 839 - protein, 17 aa, Artificial Sequence
  source: /note="Description of Artificial Sequence: sequence motif"
DMGLGYCRGGSCSHFDY

SEQ ID NO: 840 - protein, 126 aa, Artificial Sequence
  source: /note="Description of Artificial Sequence: IL-17RA binding protein"
QVQLQESGGGLVQPGRSLRLSCAASGFTFDDYAMHWVRQAPGKGLEWVSGISWNGGSIDYADSVKGRFTISRDNAKNSLYLQMNSLRAEDTALYYCAKDMGLGYCRGGSCSHFDYWGQGTMVTVSS

SEQ ID NO: 841 - protein, 5 aa, Artificial Sequence
  source: /note="Description of Artificial Sequence: sequence motif"
DYAMH

SEQ ID NO: 842 - protein, 17 aa, Artificial Sequence
  source: /note="Description of Artificial Sequence: sequence motif"
GISWNGKNVDYADSVKG

SEQ ID NO: 843 - protein, 17 aa, Artificial Sequence
  source: /note="Description of Artificial Sequence: sequence motif"
EEGLGFCRGGSCSTFDY

SEQ ID NO: 844 - protein, 126 aa, Artificial Sequence
  source: /note="Description of Artificial Sequence: IL-17RA binding protein"
EVQLVESGGGLVEPGRSLRLSCAASGFNFDDYAMHWVRQGPGKGQEWVSGISWNGKNVDYADSVKGRFTISRDNAKNSLYLQMNSLRAEDTALYYCAKEEGLGFCRGGSCSTFDYWGQGTLVTVSS

SEQ ID NO: 845 - protein, 5 aa, Artificial Sequence
  source: /note="Description of Artificial Sequence: sequence motif"
DYAMH

SEQ ID NO: 846 - protein, 17 aa, Artificial Sequence
  source: /note="Description of Artificial Sequence: sequence motif"
GISWNGKNVDYADSVKG

SEQ ID NO: 847 - protein, 17 aa, Artificial Sequence
  source: /note="Description of Artificial Sequence: sequence motif"
EEGLGFCRGGSCSTFDY

SEQ ID NO: 848 - protein, 126 aa, Artificial Sequence; identical to SEQ ID NO: 844
  source: /note="Description of Artificial Sequence: IL-17RA binding protein"

SEQ ID NO: 849 - protein, 5 aa, Artificial Sequence
  source: /note="Description of Artificial Sequence: sequence motif"
DYAMH

SEQ ID NO: 850 - protein, 17 aa, Artificial Sequence
  source: /note="Description of Artificial Sequence: sequence motif"
GISWNGKNVDYADSVKG

SEQ ID NO: 851 - protein, 17 aa, Artificial Sequence
  source: /note="Description of Artificial Sequence: sequence motif"
EEGLGFCRGGSCSTFDY

SEQ ID NO: 852 - protein, 126 aa, Artificial Sequence; identical to SEQ ID NO: 844
  source: /note="Description of Artificial Sequence: IL-17RA binding protein"

SEQ ID NO: 853 - protein, 5 aa, Artificial Sequence
  source: /note="Description of Artificial Sequence: sequence motif"
DYAMH

SEQ ID NO: 854 - protein, 17 aa, Artificial Sequence
  source: /note="Description of Artificial Sequence: sequence motif"
GISWNGKNVDYADSVKG

SEQ ID NO: 855 - protein, 17 aa, Artificial Sequence
  source: /note="Description of Artificial Sequence: sequence motif"
EEGLGFCRGGSCSTFDY

SEQ ID NO: 856 - protein, 126 aa, Artificial Sequence
  source: /note="Description of Artificial Sequence: IL-17RA binding protein"
EVQLVESGGGLVEPGRSLRLSCAASGFNLDDYAMHWVRQGPGKGQEWVSGISWNGKNVDYADSVKGRFTISRDNAKNSLYLQMNSLRAEDTALYYCAKEEGLGFCRGGSCSTFDYWGQGTLVTVSS

SEQ ID NO: 857 - protein, 5 aa, Artificial Sequence
  source: /note="Description of Artificial Sequence: sequence motif"
DYAMH

SEQ ID NO: 858 - protein, 17 aa, Artificial Sequence
  source: /note="Description of Artificial Sequence: sequence motif"
GISWNGKNVDYADSVKG

SEQ ID NO: 859 - protein, 17 aa, Artificial Sequence
  source: /note="Description of Artificial Sequence: sequence motif"
EEGLGFCRGGSCSTFDY

SEQ ID NO: 860 - protein, 126 aa, Artificial Sequence
  source: /note="Description of Artificial Sequence: IL-17RA binding protein"
QVQLVESGGGLVEPGRSLRLSCAASGFNFDDYAMHWVRQGPGKGQEWVSGISWNGKNVDYADSVKGRFTISRDNAKNSLYLQMNSLRAEDTALYYCAKEEGLGFCRGGSCSTFDYWGQGTLVTVSS

SEQ ID NO: 861 - protein, 5 aa, Artificial Sequence
  source: /note="Description of Artificial Sequence: sequence motif"
EYAMH

SEQ ID NO: 862 - protein, 17 aa, Artificial Sequence
  source: /note="Description of Artificial Sequence: sequence motif"
GISWNGDNVDYADSVKG

SEQ ID NO: 863 - protein, 17 aa, Artificial Sequence
  source: /note="Description of Artificial Sequence: sequence motif"
EEGLGYCRGGSCSTFDY

SEQ ID NO: 864 - protein, 126 aa, Artificial Sequence
  source: /note="Description of Artificial Sequence: IL-17RA binding protein"
EVQLVESGGELVEPGRSLRLSCAASGFNFDEYAMHWVRQGPGKGQEWVSGISWNGDNVDYADSVKGRFTISRDNAKNSLYLQMNSLRAEDTALYYCAKEEGLGYCRGGSCSTFDYWGQGTLVTVSS

SEQ ID NO: 865 - protein, 5 aa, Artificial Sequence
  source: /note="Description of Artificial Sequence: sequence motif"
DYAMH

SEQ ID NO: 866 - protein, 17 aa, Artificial Sequence
  source: /note="Description of Artificial Sequence: sequence motif"
GISWNGDNVDYADSVKG

SEQ ID NO: 867 - protein, 17 aa, Artificial Sequence
  source: /note="Description of Artificial Sequence: sequence motif"
EEGLGYCRGGSCSTFDY

SEQ ID NO: 868 - protein, 126 aa, Artificial Sequence
  source: /note="Description of Artificial Sequence: IL-17RA binding protein"
QVQLVESGGGLVEPGRSLRLSCAASGFNFDDYAMHWVRQGPGKGQEWVSGISWNGDNVDYADSVKGRFTISRDNAKNSLYLQMNSLRAEDTALYYCAREEGLGYCRGGSCSTFDYWGQGTLVTVSS

SEQ ID NO: 869 - protein, 5 aa, Artificial Sequence
  source: /note="Description of Artificial Sequence: sequence motif"
DYAMH

SEQ ID NO: 870 - protein, 17 aa, Artificial Sequence
  source: /note="Description of Artificial Sequence: sequence motif"
GISWNGGSLDYADSVKG

SEQ ID NO: 871 - protein, 17 aa, Artificial Sequence
  source: /note="Description of Artificial Sequence: sequence motif"
EKGLGYCRGGSCSSFDY

SEQ ID NO: 872 - protein, 126 aa, Artificial Sequence
  source: /note="Description of Artificial Sequence: IL-17RA binding protein"
QVQLVESGGGLVQPGRSLRLSCAASGFSLDDYAMHWVRQAPGKGLEWVSGISWNGGSLDYADSVKGRFTISRDNAKNSLYLEMKSLRDEDTALYYCAKEKGLGYCRGGSCSSFDYWGQGTLVTVSS

SEQ ID NO: 873 - protein, 5 aa, Artificial Sequence
  source: /note="Description of Artificial Sequence: sequence motif"
DYAMH

SEQ ID NO: 874 - protein, 17 aa, Artificial Sequence
  source: /note="Description of Artificial Sequence: sequence motif"
GISWNSGRKDYADSVKG

SEQ ID NO: 875 - protein, 17 aa, Artificial Sequence
  source: /note="Description of Artificial Sequence: sequence motif"
EEGLGYCSGGFCSTFDS

SEQ ID NO: 876 - protein, 126 aa, Artificial Sequence
  source: /note="Description of Artificial Sequence: IL-17RA binding protein"
QVQLVESGGGLVQPGRSLKLSCAASGFTFDDYAMHWVRQVPGKGLEWVSGISWNSGRKDYADSVKGRFTISRDNAKNSLYLQMNSLRAEDTALYFCAKEEGLGYCSGGFCSTFDSRGQGIVVTVSS

SEQ ID NO: 877 - protein, 5 aa, Artificial Sequence
  source: /note="Description of Artificial Sequence: sequence motif"
DYAMH

SEQ ID NO: 878 - protein, 17 aa, Artificial Sequence
  source: /note="Description of Artificial Sequence: sequence motif"
GISWNSGRKDYADSVKG

SEQ ID NO: 879 - protein, 17 aa, Artificial Sequence
  source: /note="Description of Artificial Sequence: sequence motif"
EEGLGYCSGGFCSTFDS

SEQ ID NO: 880 - protein, 126 aa, Artificial Sequence; identical to SEQ ID NO: 876
  source: /note="Description of Artificial Sequence: IL-17RA binding protein"

SEQ ID NO: 881 - protein, 5 aa, Artificial Sequence
  source: /note="Description of Artificial Sequence: sequence motif"
DYAMH

SEQ ID NO: 882 - protein, 17 aa, Artificial Sequence
  source: /note="Description of Artificial Sequence: sequence motif"
GISWNSGRKDYADSVKG

SEQ ID NO: 883 - protein, 17 aa, Artificial Sequence
  source: /note="Description of Artificial Sequence: sequence motif"
EEGLGYCSGGFCSTFDS

SEQ ID NO: 884 - protein, 126 aa, Artificial Sequence; identical to SEQ ID NO: 876
  source: /note="Description of Artificial Sequence: IL-17RA binding protein"

SEQ ID NO: 885 - protein, 5 aa, Artificial Sequence
  source: /note="Description of Artificial Sequence: sequence motif"
DYAMH

SEQ ID NO: 886 - protein, 17 aa, Artificial Sequence
  source: /note="Description of Artificial Sequence: sequence motif"
GISWNSGRKDYADSVKG

SEQ ID NO: 887 - protein, 17 aa, Artificial Sequence
  source: /note="Description of Artificial Sequence: sequence motif"
EEGLGYCSGGFCSTFDS

SEQ ID NO: 888 - protein, 126 aa, Artificial Sequence; identical to SEQ ID NO: 876
  source: /note="Description of Artificial Sequence: IL-17RA binding protein"

SEQ ID NO: 889 - protein, 5 aa, Artificial Sequence
  source: /note="Description of Artificial Sequence: sequence motif"
DYAMH

SEQ ID NO: 890 - protein, 17 aa, Artificial Sequence
  source: /note="Description of Artificial Sequence: sequence motif"
GISWNSGRKDYADSVKG

SEQ ID NO: 891 - protein, 17 aa, Artificial Sequence
  source: /note="Description of Artificial Sequence: sequence motif"
EEGLGYCSGGFCSTFDS

SEQ ID NO: 892 - protein, 126 aa, Artificial Sequence
  source: /note="Description of Artificial Sequence: IL-17RA binding protein"
QVQLVESGGGLVQPGRSLKLSCAASGFTFDDYAMHWVRQVPGKGLEBVSGISWNSGRKDYADSVKGRFTISRDNAKNSLYLQMNSLRAEDTALYFCAKEEGLGYCSGGFCSTFDSRGQGIVVTVSS

SEQ ID NO: 893 - protein, 5 aa, Artificial Sequence
  source: /note="Description of Artificial Sequence: sequence motif"
DYAMH

SEQ ID NO: 894 - protein, 17 aa, Artificial Sequence
  source: /note="Description of Artificial Sequence: sequence motif"
GISWNSGRKDYADSVKG

SEQ ID NO: 895 - protein, 17 aa, Artificial Sequence
  source: /note="Description of Artificial Sequence: sequence motif"
EEGLGYCGGGFCSTFDS

SEQ ID NO: 896 - protein, 126 aa, Artificial Sequence
  source: /note="Description of Artificial Sequence: IL-17RA binding protein"
QVQLVESGGGLVQPGRSLKLSCAASGFTFDDYAMHWVRQVPGKGLEWVSGISWNSGRKDYADSVKGRFTISRDNAKNSLYLQMNSLRAEDTALYFCAKEEGLGYCGGGFCSTFDSRGQGIVVTVSS

SEQ ID NO: 897 - protein, 5 aa, Artificial Sequence
  source: /note="Description of Artificial Sequence: sequence motif"
DYAMH

SEQ ID NO: 898 - protein, 17 aa, Artificial Sequence
  source: /note="Description of Artificial Sequence: sequence motif"
GISWNSGRKDYADSVKG

SEQ ID NO: 899 - protein, 17 aa, Artificial Sequence
  source: /note="Description of Artificial Sequence: sequence motif"
EEGLGYCGGGFCSTFDS

SEQ ID NO: 900 - protein, 126 aa, Artificial Sequence; identical to SEQ ID NO: 896
  source: /note="Description of Artificial Sequence: IL-17RA binding protein"

SEQ ID NO: 901 - protein, 5 aa, Artificial Sequence
  source: /note="Description of Artificial Sequence: sequence motif"
DYAMH

SEQ ID NO: 902 - protein, 17 aa, Artificial Sequence
  source: /note="Description of Artificial Sequence: sequence motif"
GISWNSGRKDYADSVKG

SEQ ID NO: 903 - protein, 17 aa, Artificial Sequence
  source: /note="Description of Artificial Sequence: sequence motif"
EEGLGYCSGGFCSTFDS

SEQ ID NO: 904 - protein, 126 aa, Artificial Sequence
  source: /note="Description of Artificial Sequence: IL-17RA binding protein"
EVQLVESGGGLVQPGRSLRLSCAASGFTFDDYAMHWVRQVPGKGLEWVSGISWNSGRKDYADSVKGRFTISRDNAKNSLYLQMNSLRAEDTALYFCAKEEGLGYCSGGFCSTFDSRGQGIVVTVSS

SEQ ID NO: 905 - protein, 5 aa, Artificial Sequence
  source: /note="Description of Artificial Sequence: sequence motif"
DYAMH

SEQ ID NO: 906 - protein, 17 aa, Artificial Sequence
  source: /note="Description of Artificial Sequence: sequence motif"
GISWNSGRKDYADSVKG

SEQ ID NO: 907 - protein, 17 aa, Artificial Sequence
  source: /note="Description of Artificial Sequence: sequence motif"
EEGLGYCSGGFCSTFDS

SEQ ID NO: 908 - protein, 126 aa, Artificial Sequence; identical to SEQ ID NO: 904
  source: /note="Description of Artificial Sequence: IL-17RA binding protein"

SEQ ID NO: 909 - protein, 5 aa, Artificial Sequence
  source: /note="Description of Artificial Sequence: sequence motif"
DYAMH

SEQ ID NO: 910 - protein, 17 aa, Artificial Sequence
  source: /note="Description of Artificial Sequence: sequence motif"
GISWNSGRKDYADSVKG

SEQ ID NO: 911 - protein, 17 aa, Artificial Sequence
  source: /note="Description of Artificial Sequence: sequence motif"
EEGLGYCSGGFCSTFDS

SEQ ID NO: 912 - protein, 126 aa, Artificial Sequence; identical to SEQ ID NO: 904
  source: /note="Description of Artificial Sequence: IL-17RA binding protein"

SEQ ID NO: 913 - protein, 5 aa, Artificial Sequence
  source: /note="Description of Artificial Sequence: sequence motif"
DYAMH

SEQ ID NO: 914 - protein, 17 aa, Artificial Sequence
  source: /note="Description of Artificial Sequence: sequence motif"
GISWNSDRKDYADSVKG

SEQ ID NO: 915 - protein, 17 aa, Artificial Sequence
  source: /note="Description of Artificial Sequence: sequence motif"
EEGLGYCSGGFCSTFDS

SEQ ID NO: 916 - protein, 126 aa, Artificial Sequence
  source: /note="Description of Artificial Sequence: IL-17RA binding protein"
EVQLVESGGGLVQPGRSLKLSCAASGFTFDDYAMHWVRQVPGKGLEWVSGISWNSDRKDYADSVKGRFTISRDNAKNSLYLQMNSLRAEDTALYFCAKEEGLGYCSGGFCSTFDSRGQGIVVTVSS

SEQ ID NO: 917 - protein, 5 aa, Artificial Sequence
  source: /note="Description of Artificial Sequence: sequence motif"
DYAMH

SEQ ID NO: 918 - protein, 17 aa, Artificial Sequence
  source: /note="Description of Artificial Sequence: sequence motif"
GISWNSGRKDYADSVKG

SEQ ID NO: 919 - protein, 17 aa, Artificial Sequence
  source: /note="Description of Artificial Sequence: sequence motif"
EEGLGYCSGGFCSTFDS

SEQ ID NO: 920 - protein, 126 aa, Artificial Sequence
  source: /note="Description of Artificial Sequence: IL-17RA binding protein"
QVQLVESGGGLVKPGGSLKLSCAASGFTFDDYAMHWVRQVPGKGLEWVSGISWNSGRKDYADSVKGRFTISRDNAKNSLYLQMNSLRAEDTALYFCAKEEGLGYCSGGFCSTFDSRGQGIVVTVSS

SEQ ID NO: 921 - protein, 5 aa, Artificial Sequence
  source: /note="Description of Artificial Sequence: sequence motif"
DYAMH

SEQ ID NO: 922 - protein, 17 aa, Artificial Sequence
  source: /note="Description of Artificial Sequence: sequence motif"
GISWNSGRKDYADSVKG

SEQ ID NO: 923 - protein, 17 aa, Artificial Sequence
  source: /note="Description of Artificial Sequence: sequence motif"
EEGLGYCSGGFCSTFDS

SEQ ID NO: 924 - protein, 126 aa, Artificial Sequence; identical to SEQ ID NO: 920
  source: /note="Description of Artificial Sequence: IL-17RA binding protein"

SEQ ID NO: 925 - protein, 5 aa, Artificial Sequence
  source: /note="Description of Artificial Sequence: sequence motif"
DYAMH

SEQ ID NO: 926 - protein, 17 aa, Artificial Sequence
  source: /note="Description of Artificial Sequence: sequence motif"
GISWNSGRKDYADSVKG

SEQ ID NO: 927 - protein, 17 aa, Artificial Sequence
  source: /note="Description of Artificial Sequence: sequence motif"
EEGLGYCSGGFCSTFDS

SEQ ID NO: 928 - protein, 126 aa, Artificial Sequence
  source: /note="Description of Artificial Sequence: IL-17RA binding protein"
EVQLVESGGGLVKPGGSLRLSCAASGFTFDDYAMHWVRQVPGKGLEWVSGISWNSGRKDYADSVKGRFTISRDNAKNSLYLQMNSLRAEDTALYFCAKEEGLGYCSGGFCSTFDSRGQGIVVTVSS

SEQ ID NO: 929 - protein, 5 aa, Artificial Sequence
  source: /note="Description of Artificial Sequence: sequence motif"
DYAMH

SEQ ID NO: 930 - protein, 17 aa, Artificial Sequence
  source: /note="Description of Artificial Sequence: sequence motif"
GISWNSGRLDCADSVKG

SEQ ID NO: 931 - protein, 17 aa, Artificial Sequence
  source: /note="Description of Artificial Sequence: sequence motif"
ERGLGYCSGGSCSSLEH

SEQ ID NO: 932 - protein, 126 aa, Artificial Sequence
  source: /note="Description of Artificial Sequence: IL-17RA binding protein"
QVQLQESGGGLVQPGRSLRLSCVASGFTFDDYAMHWVRQAPGKGLEWVSGISWNSGRLDCADSVKGRFTISRDNAKNSLYLQMNSLRPEDTAVYYCAKERGLGYCSGGSCSSLEHGGQGTLVTVSS

SEQ ID NO: 933 - protein, 5 aa, Artificial Sequence
  source: /note="Description of Artificial Sequence: sequence motif"
DYTMH

SEQ ID NO: 934 - protein, 17 aa, Artificial Sequence
  source: /note="Description of Artificial Sequence: sequence motif"
AISWNSGRKSYADSVKG

SEQ ID NO: 935 - protein, 17 aa, Artificial Sequence
  source: /note="Description of Artificial Sequence: sequence motif"
DGAIGYCSGGSCSDFDY

SEQ ID NO: 936 - protein, 126 aa, Artificial Sequence
  source: /note="Description of Artificial Sequence: IL-17RA binding protein"
EVBLVESGGGLVQPGRSLRLSCAASGFPFVDYTMHWVRQAPGKGLEWVAAISWNSGRKSYADSVKGRFTISRDNAKNSLYLQMNSLRAEDTALYYCAKDGAIGYCSGGSCSDFDYWGQGTLVTVSS

SEQ ID NO: 937 - protein, 5 aa, Artificial Sequence
  source: /note="Description of Artificial Sequence: sequence motif"
DYTMH

SEQ ID NO: 938 - protein, 17 aa, Artificial Sequence
  source: /note="Description of Artificial Sequence: sequence motif"
AISWNSGRKSYADSVKG

SEQ ID NO: 939 - protein, 17 aa, Artificial Sequence
  source: /note="Description of Artificial Sequence: sequence motif"
DGAIGYCSGGSCSDFDY

SEQ ID NO: 940 - protein, 126 aa, Artificial Sequence; identical to SEQ ID NO: 936
  source: /note="Description of Artificial Sequence: IL-17RA binding protein"

SEQ ID NO: 941 - protein, 5 aa, Artificial Sequence
  source: /note="Description of Artificial Sequence: sequence motif"
DYTMH

SEQ ID NO: 942 - protein, 17 aa, Artificial Sequence
  source: /note="Description of Artificial Sequence: sequence motif"
AISWNSGRKSYADSVKG

SEQ ID NO: 943 - protein, 17 aa, Artificial Sequence
  source: /note="Description of Artificial Sequence: sequence motif"
DGAIGYCSGGSCSDFDY

SEQ ID NO: 944 - protein, 126 aa, Artificial Sequence; identical to SEQ ID NO: 936
  source: /note="Description of Artificial Sequence: IL-17RA binding protein"

SEQ ID NO: 945 - protein, 5 aa, Artificial Sequence
  source: /note="Description of Artificial Sequence: sequence motif"
DYAMH

SEQ ID NO: 946 - protein, 17 aa, Artificial Sequence
  source: /note="Description of Artificial Sequence: sequence motif"
GISWNSGRLDYADSVKG

SEQ ID NO: 947 - protein, 17 aa, Artificial Sequence
  source: /note="Description of Artificial Sequence: sequence motif"
ERGLGYCSGTTCSDLDY

SEQ ID NO: 948 - protein, 126 aa, Artificial Sequence
  source: /note="Description of Artificial Sequence: IL-17RA binding protein"
EVQLVEFGGGLVBPGGSLRLSCAASGFTFDDYAMHWVRQAPGKGLEWVSGISWNSGRLDYADSVKGRFTISRDNAKDSLYLEMNSLRTEDTALYYCAKERGLGYCSGTTCSDLDYWGQGTLVTVSS

SEQ ID NO: 949 - protein, 5 aa, Artificial Sequence
  source: /note="Description of Artificial Sequence: sequence motif"
DYAMH

SEQ ID NO: 950 - protein, 17 aa, Artificial Sequence
  source: /note="Description of Artificial Sequence: sequence motif"
GISWNGGSLDYADSVKA

SEQ ID NO: 951 - protein, 17 aa, Artificial Sequence
  source: /note="Description of Artificial Sequence: sequence motif"
EEGLGFCRGGSCSTFDF

SEQ ID NO: 952 - protein, 126 aa, Artificial Sequence
  source: /note="Description of Artificial Sequence: IL-17RA binding protein"
EVQLVESGGGLVQPGGSLRLSCAASGFTFDDYAMHWVRRVPGKGLEWVSGISWNGGSLDYADSVKARFIISRDNAKDSLYLQMNSLRAEDTALYYCVKEEGLGFCRGGSCSTFDFWGQGTLVTVSS

SEQ ID NO: 953 - protein, 5 aa, Artificial Sequence
  source: /note="Description of Artificial Sequence: sequence motif"
DYAMH

SEQ ID NO: 954 - protein, 17 aa, Artificial Sequence
  source: /note="Description of Artificial Sequence: sequence motif"
GISWNSGRKDYADSVKG

SEQ ID NO: 955 - protein, 18 aa, Artificial Sequence
  source: /note="Description of Artificial Sequence: sequence motif"
EKSLGYCSSGPCSDAFDI

SEQ ID NO: 956 - protein, 127 aa, Artificial Sequence
  source: /note="Description of Artificial Sequence: IL-17RA binding protein"
QVQLVESGGGLVQPGGSLRLSCAASGFTFDDYAMHWVRQAPGKGLEWVSGISWNSGRKDYADSVKGRFTISRDNAKNSLYLQMNSLRAEDTALYYCAKEKSLGYCSSGPCSDAFDIWGQGTMVTVSS

SEQ ID NO: 957 - protein, 5 aa, Artificial Sequence
  source: /note="Description of Artificial Sequence: sequence motif"
DYAMH

SEQ ID NO: 958 - protein, 17 aa, Artificial Sequence
  source: /note="Description of Artificial Sequence: sequence motif"
GISWNSGRKDYADSVKG

SEQ ID NO: 959 - protein, 18 aa, Artificial Sequence
  source: /note="Description of Artificial Sequence: sequence motif"
EKSLGYCSSGPCSDAFDI

SEQ ID NO: 960 - protein, 127 aa, Artificial Sequence
  source: /note="Description of Artificial Sequence: IL-17RA binding protein"
QVQLVESGGGLVQPGRSLRLSCAASGFTFDDYAMHWVRQAPGKGLEWVSGISWNSGRKDYADSVKGRFTISRDNAKNSLYLQMNSLRAEDTALYYCAKEKSLGYCSSGPCSDAFDIWGQGTMVTVSS

SEQ ID NO: 961 - protein, 5 aa, Artificial Sequence
  source: /note="Description of Artificial Sequence: sequence motif"
DYAMH

SEQ ID NO: 962 - protein, 17 aa, Artificial Sequence
  source: /note="Description of Artificial Sequence: sequence motif"
GISWNSGRKDYADSVKG

SEQ ID NO: 963 - protein, 18 aa, Artificial Sequence
  source: /note="Description of Artificial Sequence: sequence motif"
EKSLGYCSSGPCSDAFDI

SEQ ID NO: 964 - protein, 127 aa, Artificial Sequence
  source: /note="Description of Artificial Sequence: IL-17RA binding protein"
QVQLVESGGGLVQPGGSLRLSCAASGFTFDDYAMHWVRQGPGKGLEWVSGISWNSGRKDYADSVKGRFTISRDNAKNSLYLQMNSLRAEDTALYYCAKEKSLGYCSSGPCSDAFDIWGQGTMVTVSS

SEQ ID NO: 965 - protein, 5 aa, Artificial Sequence
  source: /note="Description of Artificial Sequence: sequence motif"
DYAMH

SEQ ID NO: 966 - protein, 17 aa, Artificial Sequence
  source: /note="Description of Artificial Sequence: sequence motif"
GISWNSGRKDYADSVKG

SEQ ID NO: 967 - protein, 18 aa, Artificial Sequence
  source: /note="Description of Artificial Sequence: sequence motif"
EKSLGYCSSGPCSDAFDI

SEQ ID NO: 968 - protein, 127 aa, Artificial Sequence; identical to SEQ ID NO: 964
  source: /note="Description of Artificial Sequence: IL-17RA binding protein"

SEQ ID NO: 969 - protein, 5 aa, Artificial Sequence
  source: /note="Description of Artificial Sequence: sequence motif"
DYAMH

SEQ ID NO: 970 - protein, 17 aa, Artificial Sequence
  source: /note="Description of Artificial Sequence: sequence motif"
GISWNSGRKGYADSVKG

SEQ ID NO: 971 - protein, 18 aa, Artificial Sequence
  source: /note="Description of Artificial Sequence: sequence motif"
EKSLGYCSSGPCSDAFDI

SEQ ID NO: 972 - protein, 127 aa, Artificial Sequence
  source: /note="Description of Artificial Sequence: IL-17RA binding protein"
QVQLVESGGGLVQPGRSLRLSCAASGFTFDDYAMHWVRQAPGKGLEWVSGISWNSGRKGYADSVKGRFTISRDNAKNSLYLQMNSLRAEDTALYYCAKEKSLGYCSSGPCSDAFDIWGQGTMVTVSS

SEQ ID NO: 973 - protein, 5 aa, Artificial Sequence
  source: /note="Description of Artificial Sequence: sequence motif"
DYAMH

SEQ ID NO: 974 - protein, 17 aa, Artificial Sequence
  source: /note="Description of Artificial Sequence: sequence motif"
GISWNSGRKGYADSVKG

SEQ ID NO: 975 - protein, 18 aa, Artificial Sequence
  source: /note="Description of Artificial Sequence: sequence motif"
EKSLGYCSSGPCSDAFDI

SEQ ID NO: 976 - protein, 127 aa, Artificial Sequence; identical to SEQ ID NO: 972
  source: /note="Description of Artificial Sequence: IL-17RA binding protein"

SEQ ID NO: 977 - protein, 5 aa, Artificial Sequence
  source: /note="Description of Artificial Sequence: sequence motif"
DYAMH

SEQ ID NO: 978 - protein, 17 aa, Artificial Sequence
  source: /note="Description of Artificial Sequence: sequence motif"
GISWNSGRKDYADSVKG

SEQ ID NO: 979 - protein, 18 aa, Artificial Sequence
  source: /note="Description of Artificial Sequence: sequence motif"
EKSLGYCSSGPCSDAFDI

SEQ ID NO: 980 - protein, 127 aa, Artificial Sequence
  source: /note="Description of Artificial Sequence: IL-17RA binding protein"
QVQLVESGGGLVQPGRSLRLSCAASGFTFDDYAMHWVRQAPGKSLEWVSGISWNSGRKDYADSVKGRFTISRDNAKNSLYLQMNSLRAEDTALYYCAKEKSLGYCSSGPCSDAFDIWGQGTMVTVSS

SEQ ID NO: 981 - protein, 5 aa, Artificial Sequence
  source: /note="Description of Artificial Sequence: sequence motif"
DYAMH

SEQ ID NO: 982 - protein, 17 aa, Artificial Sequence
  source: /note="Description of Artificial Sequence: sequence motif"
GISWNSGRKDYADSVKG

SEQ ID NO: 983 - protein, 18 aa, Artificial Sequence
  source: /note="Description of Artificial Sequence: sequence motif"
EKSLGYCSSGPCSDAFDI

SEQ ID NO: 984 - protein, 127 aa, Artificial Sequence
  source: /note="Description of Artificial Sequence: IL-17RA binding protein"
QVQLVESGGGLVQPGRSLRLSCAASGFTFDDYAMHWVRQGPGKGLEWVSGISWNSGRKDYADSVKGRFTISRDNAKNSLYLQMNSLRAEDTALYYCAKEKSLGYCSSGPCSDAFDIWGQGTMVTVSS

SEQ ID NO: 985 - protein, 5 aa, Artificial Sequence
  source: /note="Description of Artificial Sequence: sequence motif"
DYAMH

SEQ ID NO: 986 - protein, 17 aa, Artificial Sequence
  source: /note="Description of Artificial Sequence: sequence motif"
GISWNSGREGYADSVKG

SEQ ID NO: 987 - protein, 18 aa, Artificial Sequence
  source: /note="Description of Artificial Sequence: sequence motif"
EKSLGYCSSGPCSDAFDI

SEQ ID NO: 988 - protein, 127 aa, Artificial Sequence
  source: /note="Description of Artificial Sequence: IL-17RA binding protein"
QVQLVESGGGLVQPGRSLRLSCAASGFTFDDYAMHWVRQAPGKGLEWVSGISWNSGREGYADSVKGRFTISRDNAKNSLYLQMNSLRAEDTALYYCAKEKSLGYCSSGPCSDAFDIWGQGTMVTVSS

SEQ ID NO: 989 - protein, 5 aa, Artificial Sequence
  source: /note="Description of Artificial Sequence: sequence motif"
DYAMH

SEQ ID NO: 990 - protein, 17 aa, Artificial Sequence
  source: /note="Description of Artificial Sequence: sequence motif"
GISWNSGRKDYADSVKG

SEQ ID NO: 991 - protein, 18 aa, Artificial Sequence
  source: /note="Description of Artificial Sequence: sequence motif"
EKSLGYCSSGPCSDAFDI

SEQ ID NO: 992 - protein, 127 aa, Artificial Sequence
  source: /note="Description of Artificial Sequence: IL-17RA binding protein"
EVQLVESGGGLVQPGRSLRLSCAASGFTFDDYAMHWVRQAPGKGLEWVSGISWNSGRKDYADSVKGRFTISRDNAKNSLYLQMNSLRAEDTALYYCAKEKSLGYCSSGPCSDAFDIWGQGTMVTVSS

SEQ ID NO: 993 - protein, 5 aa, Artificial Sequence
  source: /note="Description of Artificial Sequence: sequence motif"
DYAMH

SEQ ID NO: 994 - protein, 17 aa, Artificial Sequence
  source: /note="Description of Artificial Sequence: sequence motif"
GISWNSGRKDYADSVKG

SEQ ID NO: 995 - protein, 18 aa, Artificial Sequence
  source: /note="Description of Artificial Sequence: sequence motif"
EKSLGYCSSGPCSDAFDI

SEQ ID NO: 996 - protein, 127 aa, Artificial Sequence; identical to SEQ ID NO: 992
  source: /note="Description of Artificial Sequence: IL-17RA binding protein"

SEQ ID NO: 997 - protein, 5 aa, Artificial Sequence
  source: /note="Description of Artificial Sequence: sequence motif"
DYAMH

SEQ ID NO: 998 - protein, 17 aa, Artificial Sequence
  source: /note="Description of Artificial Sequence: sequence motif"
GISWNSGRKGYADSVKG

SEQ ID NO: 999 - protein, 18 aa, Artificial Sequence
  source: /note="Description of Artificial Sequence: sequence motif"
EKSLGYCSSGPCSDAFDI

SEQ ID NO: 1000 - protein, 127 aa, Artificial Sequence
  source: /note="Description of Artificial Sequence: IL-17RA binding protein"
EVQLVESGGGLVQPGRSLRLSCAASGFTFDDYAMHWVRQAPGKGLEWVSGISWNSGRKGYADSVKGRFTISRDNAKNSLYLQMNSLRAEDTALYYCAKEKSLGYCSSGPCSDAFDIWGQGTMVTVSS

SEQ ID NO: 1001 - protein, 5 aa, Artificial Sequence
  source: /note="Description of Artificial Sequence: sequence motif"
DYAMH

SEQ ID NO: 1002 - protein, 17 aa, Artificial Sequence
  source: /note="Description of Artificial Sequence: sequence motif"
GISWNSGRKGYADSVKG

SEQ ID NO: 1003 - protein, 18 aa, Artificial Sequence
  source: /note="Description of Artificial Sequence: sequence motif"
EKSLGYCSSGPCSDAFDI

SEQ ID NO: 1004 - protein, 127 aa, Artificial Sequence; identical to SEQ ID NO: 1000
  source: /note="Description of Artificial Sequence: IL-17RA binding protein"

SEQ ID NO: 1005 - protein, 5 aa, Artificial Sequence
  source: /note="Description of Artificial Sequence: sequence motif"
DYAMH

SEQ ID NO: 1006 - protein, 17 aa, Artificial Sequence
  source: /note="Description of Artificial Sequence: sequence motif"
GISWNSGRMGYADSVKG

SEQ ID NO: 1007 - protein, 18 aa, Artificial Sequence
  source: /note="Description of Artificial Sequence: sequence motif"
EKSLGYCSSGPCSDAFDI

SEQ ID NO: 1008 - protein, 127 aa, Artificial Sequence
  source: /note="Description of Artificial Sequence: IL-17RA binding protein"
QVQLVESGGGLVQPGRSLRLSCAASGFTFDDYAMHWVRQAPGKGLEWVSGISWNSGRMGYADSVKGRFTISRDNAKNSLYLQMNSLRADDTALYYCAKEKSLGYCSSGPCSDAFDIWGQGTMVTVSS

SEQ ID NO: 1009 - protein, 5 aa, Artificial Sequence
  source: /note="Description of Artificial Sequence: sequence motif"
DYAMH

SEQ ID NO: 1010 - protein, 17 aa, Artificial Sequence
  source: /note="Description of Artificial Sequence: sequence motif"
GISWNSGRKDYADSVKG

SEQ ID NO: 1011 - protein, 18 aa, Artificial Sequence
  source: /note="Description of Artificial Sequence: sequence motif"
EKSLGYCSSGPCSDAFDI

SEQ ID NO: 1012 - protein, 127 aa, Artificial Sequence
  source: /note="Description of Artificial Sequence: IL-17RA binding protein"
EVQLVESGGGLVQPGRSLRLSCAASGFTFDDYAMHWVRQGPGKGLEWVSGISWNSGRKDYADSVKGRFTISRDNAKNSLYLQMNSLRAEDTALYYCAKEKSLGYCSSGPCSDAFDIWGQGTMVTVSS

SEQ ID NO: 1013 - protein, 5 aa, Artificial Sequence
  source: /note="Description of Artificial Sequence: sequence motif"
DYAMH

SEQ ID NO: 1014 - protein, 17 aa, Artificial Sequence
  source: /note="Description of Artificial Sequence: sequence motif"
GISWNSGRKDYADSVKG

SEQ ID NO: 1015 - protein, 18 aa, Artificial Sequence
  source: /note="Description of Artificial Sequence: sequence motif"
EKSLGYCSSGPCSDAFDI

SEQ ID NO: 1016 - protein, 127 aa, Artificial Sequence; identical to SEQ ID NO: 1012
  source: /note="Description of Artificial Sequence: IL-17RA binding protein"

SEQ ID NO: 1017 - protein, 5 aa, Artificial Sequence
  source: /note="Description of Artificial Sequence: sequence motif"
DYAMH

SEQ ID NO: 1018 - protein, 17 aa, Artificial Sequence
  source: /note="Description of Artificial Sequence: sequence motif"
GISWNSGRKDYADSVKG

SEQ ID NO: 1019 - protein, 18 aa, Artificial Sequence
  source: /note="Description of Artificial Sequence: sequence motif"
EKSLGYCSSGPCSDAFDI

SEQ ID NO: 1020 - protein, 127 aa, Artificial Sequence; identical to SEQ ID NO: 1012
  source: /note="Description of Artificial Sequence: IL-17RA binding protein"

SEQ ID NO: 1021 - protein, 5 aa, Artificial Sequence
  source: /note="Description of Artificial Sequence: sequence motif"
DYAMH

SEQ ID NO: 1022 - protein, 17 aa, Artificial Sequence
  source: /note="Description of Artificial Sequence: sequence motif"
GISWNSGRKDYADSVKG

SEQ ID NO: 1023 - protein, 18 aa, Artificial Sequence
  source: /note="Description of Artificial Sequence: sequence motif"
EKSLGYCSSGPCSDAFDI

SEQ ID NO: 1024 - protein, 127 aa, Artificial Sequence; identical to SEQ ID NO: 1012
  source: /note="Description of Artificial Sequence: IL-17RA binding protein"

SEQ ID NO: 1025 - protein, 5 aa, Artificial Sequence
  source: /note="Description of Artificial Sequence: sequence motif"
DYAMH

SEQ ID NO: 1026 - protein, 17 aa, Artificial Sequence
  source: /note="Description of Artificial Sequence: sequence motif"
GISWNSGRKDYADSVKG

SEQ ID NO: 1027 - protein, 18 aa, Artificial Sequence
  source: /note="Description of Artificial Sequence: sequence motif"
EKSLGYCSSGPCSDAFDI

SEQ ID NO: 1028 - protein, 127 aa, Artificial Sequence
  source: /note="Description of Artificial Sequence: IL-17RA binding protein"
QVQLVESGGGLVBPGRSLRLSCAASGFTFDDYAMHWVRQGPGKGLEWVSGISWNSGRKDYADSVKGRFTISRDNAKNSLYLQMDSLRAEDTALYYCAKEKSLGYCSSGPCSDAFDIWGQGTMVTVSS

SEQ ID NO: 1029 - protein, 5 aa, Artificial Sequence
  source: /note="Description of Artificial Sequence: sequence motif"
DYAMH

SEQ ID NO: 1030 - protein, 17 aa, Artificial Sequence
  source: /note="Description of Artificial Sequence: sequence motif"
GISWNSGRKGYADSVKG

SEQ ID NO: 1031 - protein, 18 aa, Artificial Sequence
  source: /note="Description of Artificial Sequence: sequence motif"
EKSLGYCSSGPCSDAFDI

SEQ ID NO: 1032 - protein, 127 aa, Artificial Sequence
  source: /note="Description of Artificial Sequence: IL-17RA binding protein"
EVQLVESGGGLVQPGRSLRLSCAASGFTFDDYAMHWVRQAPGKGLEWVSGISWNSGRKGYADSVKGRFTISRDNAKSSLYLQMNSLRAEDTALYYCAKEKSLGYCSSGPCSDAFDIWGQGTMVTVSS

SEQ ID NO: 1033 - protein, 5 aa, Artificial Sequence
  source: /note="Description of Artificial Sequence: sequence motif"
DYAMH

SEQ ID NO: 1034 - protein, 17 aa, Artificial Sequence
  source: /note="Description of Artificial Sequence: sequence motif"
GISWNSGRMGYADSVKG

SEQ ID NO: 1035 - protein, 18 aa, Artificial Sequence
  source: /note="Description of Artificial Sequence: sequence motif"
EKSLGYCSSGPCSDAFDI

SEQ ID NO: 1036 - protein, 127 aa, Artificial Sequence
  source: /note="Description of Artificial Sequence: IL-17RA binding protein"
EVQLVESGGGLVQPGRSLRLSCAASGFTFEDYAMHWVRQAPGKGLEWVSGISWNSGRMGYADSVKGRFTISRDNAKNSLYLQMNSLRADDTALYYCAKEKSLGYCSSGPCSDAFDIWGQGTMVTVSS

SEQ ID NO: 1037 - protein, 5 aa, Artificial Sequence
  source: /note="Description of Artificial Sequence: sequence motif"
DYAMH

SEQ ID NO: 1038 - protein, 17 aa, Artificial Sequence
  source: /note="Description of Artificial Sequence: sequence motif"
GISWNSGRMGYADSVKG

SEQ ID NO: 1039 - protein, 18 aa, Artificial Sequence
  source: /note="Description of Artificial Sequence: sequence motif"
EKSLGYCSSGPCSDAFDI

SEQ ID NO: 1040 - protein, 127 aa, Artificial Sequence; identical to SEQ ID NO: 1036
  source: /note="Description of Artificial Sequence: IL-17RA binding protein"

SEQ ID NO: 1041 - protein, 5 aa, Artificial Sequence
  source: /note="Description of Artificial Sequence: sequence motif"
DYAMH

SEQ ID NO: 1042 - protein, 17 aa, Artificial Sequence
  source: /note="Description of Artificial Sequence: sequence motif"
GISWNSGRMGYADSVKG

SEQ ID NO: 1043 - protein, 18 aa, Artificial Sequence
  source: /note="Description of Artificial Sequence: sequence motif"
EKSLGYCSSGPCSDAFDI

SEQ ID NO: 1044 - protein, 127 aa, Artificial Sequence; identical to SEQ ID NO: 1036
  source: /note="Description of Artificial Sequence: IL-17RA binding protein"

SEQ ID NO: 1045 - protein, 5 aa, Artificial Sequence
  source: /note="Description of Artificial Sequence: sequence motif"
DYAMH

SEQ ID NO: 1046 - protein, 17 aa, Artificial Sequence
  source: /note="Description of Artificial Sequence: sequence motif"
GISWNSGRMGYADSVKG

SEQ ID NO: 1047 - protein, 18 aa, Artificial Sequence
  source: /note="Description of Artificial Sequence: sequence motif"
EKSLGYCSSGPCSDAFDI

SEQ ID NO: 1048 - protein, 127 aa, Artificial Sequence; identical to SEQ ID NO: 1036
  source: /note="Description of Artificial Sequence: IL-17RA binding protein"

SEQ ID NO: 1049 - protein, 5 aa, Artificial Sequence
  source: /note="Description of Artificial Sequence: sequence motif"
DYAMH

SEQ ID NO: 1050 - protein, 17 aa, Artificial Sequence
  source: /note="Description of Artificial Sequence: sequence motif"
GISWNSGRMGYADSVKG

SEQ ID NO: 1051 - protein, 18 aa, Artificial Sequence
  source: /note="Description of Artificial Sequence: sequence motif"
EKSLGYCSSGPCSDAFDI

SEQ ID NO: 1052 - protein, 127 aa, Artificial Sequence; identical to SEQ ID NO: 1036
  source: /note="Description of Artificial Sequence: IL-17RA binding protein"

SEQ ID NO: 1053 - protein, 5 aa, Artificial Sequence
  source: /note="Description of Artificial Sequence: sequence motif"
DYAMH

SEQ ID NO: 1054 - protein, 17 aa, Artificial Sequence
  source: /note="Description of Artificial Sequence: sequence motif"
GISWNSGRMGYADSVKG

SEQ ID NO: 1055 - protein, 18 aa, Artificial Sequence
  source: /note="Description of Artificial Sequence: sequence motif"
EKSLGYCSSGPCSDAFDI

SEQ ID NO: 1056 - protein, 127 aa, Artificial Sequence; identical to SEQ ID NO: 1036
  source: /note="Description of Artificial Sequence: IL-17RA binding protein"

SEQ ID NO: 1057 - protein, 5 aa, Artificial Sequence
  source: /note="Description of Artificial Sequence: sequence motif"
DYAMH

SEQ ID NO: 1058 - protein, 17 aa, Artificial Sequence
  source: /note="Description of Artificial Sequence: sequence motif"
GISWNSGRMGYADSVKG

SEQ ID NO: 1059 - protein, 18 aa, Artificial Sequence
  source: /note="Description of Artificial Sequence: sequence motif"
EKSLGYCSSGPCSDAFDI

SEQ ID NO: 1060 - protein, 127 aa, Artificial Sequence
  source: /note="Description of Artificial Sequence: IL-17RA binding protein"
QVQLVESGGGLVQPGRSLRLSCAASGFTFEDYAMHWVRQAPGKGLEWVSGISWNSGRMGYADSVKGRFTISRDNAKNSLYLQMNSLRADDTALYYCAKEKSLGYCSSGPCSDAFDIWGQGTMVTVSS

SEQ ID NO: 1061 - protein, 5 aa, Artificial Sequence
  source: /note="Description of Artificial Sequence: sequence motif"
DYAMH

SEQ ID NO: 1062 - protein, 17 aa, Artificial Sequence
  source: /note="Description of Artificial Sequence: sequence motif"
GISWNSGRMGYADSVKG

SEQ ID NO: 1063 - protein, 18 aa, Artificial Sequence
  source: /note="Description of Artificial Sequence: sequence motif"
EKSLGYCSSGPCSDAFDI

SEQ ID NO: 1064 - protein, 127 aa, Artificial Sequence; identical to SEQ ID NO: 1060
  source: /note="Description of Artificial Sequence: IL-17RA binding protein"

SEQ ID NO: 1065 - protein, 5 aa, Artificial Sequence
  source: /note="Description of Artificial Sequence: sequence motif"
DYAMH

SEQ ID NO: 1066 - protein, 17 aa, Artificial Sequence
  source: /note="Description of Artificial Sequence: sequence motif"
GISWNSGRMGYADSVKG

SEQ ID NO: 1067 - protein, 18 aa, Artificial Sequence
  source: /note="Description of Artificial Sequence: sequence motif"
EKSLGYCSSGPCSDAFDI

SEQ ID NO: 1068 - protein, 127 aa, Artificial Sequence; identical to SEQ ID NO: 1060
  source: /note="Description of Artificial Sequence: IL-17RA binding protein"

SEQ ID NO: 1069 - protein, 5 aa, Artificial Sequence
  source: /note="Description of Artificial Sequence: sequence motif"
DYAMH

SEQ ID NO: 1070 - protein, 17 aa, Artificial Sequence
  source: /note="Description of Artificial Sequence: sequence motif"
GISWNSGRMGYADSVKG

SEQ ID NO: 1071 - protein, 18 aa, Artificial Sequence
  source: /note="Description of Artificial Sequence: sequence motif"
EKSLGYCSSGPCSDAFDI

SEQ ID NO: 1072 - protein, 127 aa, Artificial Sequence; identical to SEQ ID NO: 1060
  source: /note="Description of Artificial Sequence: IL-17RA binding protein"

SEQ ID NO: 1073 - protein, 5 aa, Artificial Sequence
  source: /note="Description of Artificial Sequence: sequence motif"
DYAMH

SEQ ID NO: 1074 - protein, 17 aa, Artificial Sequence
  source: /note="Description of Artificial Sequence: sequence motif"
GISWNSGRMGYADSVKG

SEQ ID NO: 1075 - protein, 18 aa, Artificial Sequence
  source: /note="Description of Artificial Sequence: sequence motif"
EKSLGYCSSGPCSDAFDI

SEQ ID NO: 1076 - protein, 127 aa, Artificial Sequence; identical to SEQ ID NO: 1060
  source: /note="Description of Artificial Sequence: IL-17RA binding protein"

SEQ ID NO: 1077 - protein, 5 aa, Artificial Sequence
  source: /note="Description of Artificial Sequence: sequence motif"
DYAMH

SEQ ID NO: 1078 - protein, 17 aa, Artificial Sequence
  source: /note="Description of Artificial Sequence: sequence motif"
GISWNSGRMGYADSVKG

SEQ ID NO: 1079 - protein, 18 aa, Artificial Sequence
  source: /note="Description of Artificial Sequence: sequence motif"
EKSLGYCSSGPCSDAFDI

SEQ ID NO: 1080 - protein, 127 aa, Artificial Sequence
  source: /note="Description of Artificial Sequence: IL-17RA binding protein"
EVQLVESGGGLVQPGGSLRLSCAASGFTFEDYAMHWVRQAPGKGLEWVSGISWNSGRMGYADSVKGRFTISRDNAKNSLYLQMNSLRADDTALYYCAKEKSLGYCSSGPCSDAFDIWGQGTMVTVSS

SEQ ID NO: 1081 - protein, 5 aa, Artificial Sequence
  source: /note="Description of Artificial Sequence: sequence motif"
DYAMH

SEQ ID NO: 1082 - protein, 17 aa, Artificial Sequence
  source: /note="Description of Artificial Sequence: sequence motif"
GISWNSGRTGYADSVKG

SEQ ID NO: 1083 - protein, 18 aa, Artificial Sequence
  source: /note="Description of Artificial Sequence: sequence motif"
EKSLGYCSGGSCSDAFDI

SEQ ID NO: 1084 - protein, 127 aa, Artificial Sequence
  source: /note="Description of Artificial Sequence: IL-17RA binding protein"
QVQLVESGGGLVQPGRSLRLSCAASGFTFDDYAMHWVRQAPGKGLEWVSGISWNSGRTGYADSVKGRFTISRDNAKNSLYLQMNSLRAEDTALYYCAKEKSLGYCSGGSCSDAFDIWGQGTMVTVSS

SEQ ID NO: 1085 - protein, 5 aa, Artificial Sequence
  source: /note="Description of Artificial Sequence: sequence motif"
DYAMH

SEQ ID NO: 1086 - protein, 17 aa, Artificial Sequence
  source: /note="Description of Artificial Sequence: sequence motif"
GISWNSGRIGYADSVKG

SEQ ID NO: 1087 - protein, 18 aa, Artificial Sequence
  source: /note="Description of Artificial Sequence: sequence motif"
EKSLGYCSGGSCSDAFDI

SEQ ID NO: 1088 - protein, 127 aa, Artificial Sequence
  source: /note="Description of Artificial Sequence: IL-17RA binding protein"
EVQLVESGGGLVQPGRSLRLSCAASGFTFDDYAMHWVRQAPGKGLEWVSGISWNSGRIGYADSVKGRFTISRDNAKNSLYLQMNSLRAEDTALYYCAKEKSLGYCSGGSCSDAFDIWGQGTMVTVSS

SEQ ID NO: 1089 - protein, 5 aa, Artificial Sequence
  source: /note="Description of Artificial Sequence: sequence motif"
DYAMH

SEQ ID NO: 1090 - protein, 17 aa, Artificial Sequence
  source: /note="Description of Artificial Sequence: sequence motif"
GISWNSGRIGYADSVKG

SEQ ID NO: 1091 - protein, 18 aa, Artificial Sequence
  source: /note="Description of Artificial Sequence: sequence motif"
EKSLGYCSGGTCSDAFDI

SEQ ID NO: 1092 - protein, 127 aa, Artificial Sequence
  source: /note="Description of Artificial Sequence: IL-17RA binding protein"
EVQLVESGGGLVQPGRSLRLSCAASGFTFDDYAMHWVRQAPGKGLEWVSGISWNSGRIGYADSVKGRFTISRDNAKNSLYLQMNSLRAEDTALYYCTKEKSLGYCSGGTCSDAFDIWGQGTMVTVSS

SEQ ID NO: 1093 - protein, 5 aa, Artificial Sequence
  source: /note="Description of Artificial Sequence: sequence motif"
DYAMH

SEQ ID NO: 1094 - protein, 17 aa, Artificial Sequence
  source: /note="Description of Artificial Sequence: sequence motif"
GISWNSGRIGYADSVKG

SEQ ID NO: 1095 - protein, 18 aa, Artificial Sequence
  source: /note="Description of Artificial Sequence: sequence motif"
EKSLGYCSGGTCSDAFDI

SEQ ID NO: 1096 - protein, 127 aa, Artificial Sequence; identical to SEQ ID NO: 1092
  source: /note="Description of Artificial Sequence: IL-17RA binding protein"

SEQ ID NO: 1097 - protein, 5 aa, Artificial Sequence
  source: /note="Description of Artificial Sequence: sequence motif"
DYAMH

SEQ ID NO: 1098 - protein, 17 aa, Artificial Sequence
  source: /note="Description of Artificial Sequence: sequence motif"
GISWNSGRIGYADSVKG

SEQ ID NO: 1099 - protein, 18 aa, Artificial Sequence
  source: /note="Description of Artificial Sequence: sequence motif"
EKSLGYCSGGTCSDAFDI

SEQ ID NO: 1100 - protein, 127 aa, Artificial Sequence
  source: /note="Description of Artificial Sequence: IL-17RA binding protein"
QVQLVESGGGLVQPGRSLRLSCAASGFTFDDYAMHWVRQAPGKGLEWVSGISWNSGRIGYADSVKGRFTISRDNAKNSLYLQMNSLRAEDTALYYCTKEKSLGYCSGGTCSDAFDIWGQGTMVTVSS

SEQ ID NO: 1101 - protein, 5 aa, Artificial Sequence
  source: /note="Description of Artificial Sequence: sequence motif"
DYAMH

SEQ ID NO: 1102 - protein, 17 aa, Artificial Sequence
  source: /note="Description of Artificial Sequence: sequence motif"
GISWNGGRIGYADSVKG

SEQ ID NO: 1103 - protein, 18 aa, Artificial Sequence
  source: /note="Description of Artificial Sequence: sequence motif"
EKSLGYCSGGTCSDAFDI

SEQ ID NO: 1104 - protein, 127 aa, Artificial Sequence
  source: /note="Description of Artificial Sequence: IL-17RA binding protein"
EVQLVESGGGWVQPGRSLRLSCAASGFTFDDYAMHWVRQAPGKGLEWVSGISWNGGRIGYADSVKGRFTISRDNAKNSLYLQMNSLRAEDTALYYCTKEKSLGYCSGGTCSDAFDIWGQGTMVTVSS

SEQ ID NO: 1105 - protein, 5 aa, Artificial Sequence
  source: /note="Description of Artificial Sequence: sequence motif"
DYAMH

SEQ ID NO: 1106 - protein, 17 aa, Artificial Sequence
  source: /note="Description of Artificial Sequence: sequence motif"
GISWNGGRIGYADSVKG

SEQ ID NO: 1107 - protein, 18 aa, Artificial Sequence
  source: /note="Description of Artificial Sequence: sequence motif"
EKSLGYCSGGTCSDAFDI

SEQ ID NO: 1108 - protein, 127 aa, Artificial Sequence
  source: /note="Description of Artificial Sequence: IL-17RA binding protein"
EVQLVESGGGLVQPGGSLRLSCAASGFTFDDYAMHWVRQAPGKGLEWVSGISWNGGRIGYADSVKGRFTISRDNAKNSLYLQMNSLRAEDTALYYCTKEKSLGYCSGGTCSDAFDIWGQGTMVTVSS

SEQ ID NO: 1109 - protein, 5 aa, Artificial Sequence
  source: /note="Description of Artificial Sequence: sequence motif"
DYAMH

SEQ ID NO: 1110 - protein, 17 aa, Artificial Sequence
  source: /note="Description of Artificial Sequence: sequence motif"
GISWNSGRKGYADSVKG

SEQ ID NO: 1111 - protein, 18 aa, Artificial Sequence
  source: /note="Description of Artificial Sequence: sequence motif"
EKSLGYCSGGTCSDAFDI

SEQ ID NO: 1112 - protein, 127 aa, Artificial Sequence
  source: /note="Description of Artificial Sequence: IL-17RA binding protein"
EVQLVESGGGLVQPGGSLRLSCAASGFTFDDYAMHWVRQAPGKGLEWVSGISWNSGRKGYADSVKGRFTISRDNAKNSLYLQMNSLRAEDTALYYCTKEKSLGYCSGGTCSDAFDIWGQGTMVTVSS

SEQ ID NO: 1113 - protein, 5 aa, Artificial Sequence
  source: /note="Description of Artificial Sequence: sequence motif"
DYAMH

SEQ ID NO: 1114 - protein, 17 aa, Artificial Sequence
  source: /note="Description of Artificial Sequence: sequence motif"
GISWNSGRMGYADSVKG

SEQ ID NO: 1115 - protein, 18 aa, Artificial Sequence
  source: /note="Description of Artificial Sequence: sequence motif"
EKSLGYCSGGTCSDAFDI

SEQ ID NO: 1116 - protein, 127 aa, Artificial Sequence
  source: /note="Description of Artificial Sequence: IL-17RA binding protein"
EVQLVESGGGLVQPGGSLRLSCAASGFTFADYAMHWVRQAPGKGLEWVSGISWNSGRMGYADSVKGRFTISRDNAKNSLSLQMNSLRAEDTALYYCTKEKSLGYCSGGTCSDAFDIWGQGTMVTVSS

SEQ ID NO: 1117 - protein, 5 aa, Artificial Sequence
  source: /note="Description of Artificial Sequence: sequence motif"
DYAMH

SEQ ID NO: 1118 - protein, 17 aa, Artificial Sequence
  source: /note="Description of Artificial Sequence: sequence motif"
GISWNSGRIEYADSVKG

SEQ ID NO: 1119 - protein, 18 aa, Artificial Sequence
  source: /note="Description of Artificial Sequence: sequence motif"
EKSLGYCSGGTCSDAFDI

SEQ ID NO: 1120 - protein, 127 aa, Artificial Sequence
  source: /note="Description of Artificial Sequence: IL-17RA binding protein"
EVQLVESGGGLVQPGRSLRLSCAASGFTFDDYAMHWVRQAPGKGLEWVSGISWNSGRIEYADSVKGRFTISRDNAKNSLYLQMNSLRAEDTALYFCTKEKSLGYCSGGTCSDAFDIWGQGTMVTVSS

SEQ ID NO: 1121 - protein, 5 aa, Artificial Sequence
  source: /note="Description of Artificial Sequence: sequence motif"
EYAMH

SEQ ID NO: 1122 - protein, 17 aa, Artificial Sequence
  source: /note="Description of Artificial Sequence: sequence motif"
GISWNSGRKGYADSVKG

SEQ ID NO: 1123 - protein, 18 aa, Artificial Sequence
  source: /note="Description of Artificial Sequence: sequence motif"
EKSLGYCSGGSCSDGFDI

SEQ ID NO: 1124 - protein, 127 aa, Artificial Sequence
  source: /note="Description of Artificial Sequence: IL-17RA binding protein"
QVQLVESGGGLVQPGRSLRLSCAASGFSFDEYAMHWVRQAPGKGLEWVSGISWNSGRKGYADSVKGRFTISRDNAKNSLYLQMNSLRAEDTALYYCAKEKSLGYCSGGSCSDGFDIWGQGTMVTVSS

SEQ ID NO: 1125 - protein, 5 aa, Artificial Sequence
  source: /note="Description of Artificial Sequence: sequence motif"
EYAMH

SEQ ID NO: 1126 - protein, 17 aa, Artificial Sequence
  source: /note="Description of Artificial Sequence: sequence motif"
GISWNSGRKGYADSVKG

SEQ ID NO: 1127 - protein, 18 aa, Artificial Sequence
  source: /note="Description of Artificial Sequence: sequence motif"
EKSLGYCSGGSCSDGFDI

SEQ ID NO: 1128 - protein, 127 aa, Artificial Sequence; identical to SEQ ID NO: 1124
  source: /note="Description of Artificial Sequence: IL-17RA binding protein"

SEQ ID NO: 1129 - protein, 5 aa, Artificial Sequence
  source: /note="Description of Artificial Sequence: sequence motif"
EYAMH

SEQ ID NO: 1130 - protein, 17 aa, Artificial Sequence
  source: /note="Description of Artificial Sequence: sequence motif"
GISWNSGRKGYADSVKG

SEQ ID NO: 1131 - protein, 18 aa, Artificial Sequence
  source: /note="Description of Artificial Sequence: sequence motif"
EKSLGYCSGGSCSDGFDI

SEQ ID NO: 1132 - protein, 127 aa, Artificial Sequence; identical to SEQ ID NO: 1124
  source: /note="Description of Artificial Sequence: IL-17RA binding protein"

SEQ ID NO: 1133 - protein, 5 aa, Artificial Sequence
  source: /note="Description of Artificial Sequence: sequence motif"
EYAMH

SEQ ID NO: 1134 - protein, 17 aa, Artificial Sequence
  source: /note="Description of Artificial Sequence: sequence motif"
GISWNSGRKGYADSVKG

SEQ ID NO: 1135 - protein, 18 aa, Artificial Sequence
  source: /note="Description of Artificial Sequence: sequence motif"
EKSLGYCSGGSCSDGFDI

SEQ ID NO: 1136 - protein, 127 aa, Artificial Sequence
  source: /note="Description of Artificial Sequence: IL-17RA binding protein"
EVQLVESGGGLVQPGRSLRLSCAASGFSFDEYAMHWVRQAPGKGLEWVSGISWNSGRKGYADSVKGRFTISRDNAKNSLYLQMNSLRAEDTALYYCAKEKSLGYCSGGSCSDGFDIWGQGTMVTVSS

SEQ ID NO: 1137 - protein, 5 aa, Artificial Sequence
  source: /note="Description of Artificial Sequence: sequence motif"
EYAMH

SEQ ID NO: 1138 - protein, 17 aa, Artificial Sequence
  source: /note="Description of Artificial Sequence: sequence motif"
GISWNSGRKGYADSVKG

SEQ ID NO: 1139 - protein, 18 aa, Artificial Sequence
  source: /note="Description of Artificial Sequence: sequence motif"
EKSLGYCSGGSCSDGFDI

SEQ ID NO: 1140 - protein, 127 aa, Artificial Sequence; identical to SEQ ID NO: 1136
  source: /note="Description of Artificial Sequence: IL-17RA binding protein"

SEQ ID NO: 1141 - protein, 5 aa, Artificial Sequence
  source: /note="Description of Artificial Sequence: sequence motif"
EYAMH

SEQ ID NO: 1142 - protein, 17 aa, Artificial Sequence
  source: /note="Description of Artificial Sequence: sequence motif"
GISWNSGRKGYADSVKG

SEQ ID NO: 1143 - protein, 18 aa, Artificial Sequence
  source: /note="Description of Artificial Sequence: sequence motif"
EKSLGYCSGGSCSDGFDM

SEQ ID NO: 1144 - protein, 127 aa, Artificial Sequence
  source: /note="Description of Artificial Sequence: IL-17RA binding protein"
EVQLVESGGGLVQPGRSLRLSCAASGFSFDEYAMHWVRQAPGKGLEWVSGISWNSGRKGYADSVKGRFTISRDNAKNSLYLQMNSLRAEDTALYYCAKEKSLGYCSGGSCSDGFDMWGQGTMVTVSS

SEQ ID NO: 1145 - protein, 5 aa, Artificial Sequence
  source: /note="Description of Artificial Sequence: sequence motif"
DYAMH

SEQ ID NO: 1146 - protein, 17 aa, Artificial Sequence
  source: /note="Description of Artificial Sequence: sequence motif"
GITWNSGRKDYADSVKG

SEQ ID NO: 1147 - protein, 18 aa, Artificial Sequence
  source: /note="Description of Artificial Sequence: sequence motif"
EKSLGYCSGGTCSNAFDI

SEQ ID NO: 1148 - protein, 127 aa, Artificial Sequence
  source: /note="Description of Artificial Sequence: IL-17RA binding protein"
QVQLVESGGGLVQPGRSLRLSCAASGFTFDDYAMHWVRQAPGKGLEWVSGITWNSGRKDYADSVKGRFTISRDNAKNSLYLQMNSLRAEDTALYYCTKEKSLGYCSGGTCSNAFDIWGQGTMVTVSS

SEQ ID NO: 1149 - protein, 5 aa, Artificial Sequence
  source: /note="Description of Artificial Sequence: sequence motif"
DYAMH

SEQ ID NO: 1150 - protein, 17 aa, Artificial Sequence
  source: /note="Description of Artificial Sequence: sequence motif"
GITWNSGRKDYADSVKG

SEQ ID NO: 1151 - protein, 18 aa, Artificial Sequence
  source: /note="Description of Artificial Sequence: sequence motif"
EKSLGYCSGGTCSNAFDI

SEQ ID NO: 1152 - protein, 127 aa, Artificial Sequence
  source: /note="Description of Artificial Sequence: IL-17RA binding protein"
EVQLVESGGGLVQPGRSLRLSCAASGFTFDDYAMHWVRQAPGKGLEWVSGITWNSGRKDYADSVKGRFTISRDNAKNSLYLQMNSLRAEDTALYYCTKEKSLGYCSGGTCSNAFDIWGQGTMVTVSS

SEQ ID NO: 1153 - protein, 5 aa, Artificial Sequence
  source: /note="Description of Artificial Sequence: sequence motif"
DYAMH

SEQ ID NO: 1154 - protein, 17 aa, Artificial Sequence
  source: /note="Description of Artificial Sequence: sequence motif"
GISWNSGRKDYADSVKG

SEQ ID NO: 1155 - protein, 18 aa, Artificial Sequence
  source: /note="Description of Artificial Sequence: sequence motif"
EKSLGYCSGGSCSDAFDI

SEQ ID NO: 1156 - protein, 127 aa, Artificial Sequence
  source: /note="Description of Artificial Sequence: IL-17RA binding protein"
QVQLVESGGGLVQPGRSLRLSCAASGFTFEDYAMHWVRQAPGKGLEWVSGISWNSGRKDYADSVKGRFTVSRDNAKNSLFLQMNSLRAEDTALYYCVKEKSLGYCSGGSCSDAFDIWGQGAMVTVSS

SEQ ID NO: 1157 - protein, 5 aa, Artificial Sequence
  source: /note="Description of Artificial Sequence: sequence motif"
DYAMH

SEQ ID NO: 1158 - protein, 17 aa, Artificial Sequence
  source: /note="Description of Artificial Sequence: sequence motif"
GISWNSGRKDYADSVKG

SEQ ID NO: 1159 - protein, 18 aa, Artificial Sequence
  source: /note="Description of Artificial Sequence: sequence motif"
EKSLGYCSGGSCSDAFDI

SEQ ID NO: 1160 - protein, 127 aa, Artificial Sequence
  source: /note="Description of Artificial Sequence: IL-17RA binding protein"
EVQLVESGGGLVQPGRSLRLSCAASGFTFEDYAMHWVRQAPGKGLEWVSGISWNSGRKDYADSVKGRFTVSRDNAKNSLFLQMNSLRAEDTALYYCVKEKSLGYCSGGSCSDAFDIWGQGTMVTVSS

SEQ ID NO: 1161 - protein, 5 aa, Artificial Sequence
  source: /note="Description of Artificial Sequence: sequence motif"
DYAMH

SEQ ID NO: 1162 - protein, 17 aa, Artificial Sequence
  source: /note="Description of Artificial Sequence: sequence motif"
GISWNSGRKDYADSVKG

SEQ ID NO: 1163 - protein, 18 aa, Artificial Sequence
  source: /note="Description of Artificial Sequence: sequence motif"
EKSLGYCSGGSCSDAFDI

SEQ ID NO: 1164 - protein, 127 aa, Artificial Sequence
  source: /note="Description of Artificial Sequence: IL-17RA binding protein"
QVQLVESGGGLVQPGRSLRLSCAASGFTVDDYAMHWVRQAPGKGLEWVSGISWNSGRKDYADSVKGRFTVSRDNAKNSLFLQMNSLRAEDTALYYCVKEKSLGYCSGGSCSDAFDIWGQGTMVTVSS

SEQ ID NO: 1165 - protein, 5 aa, Artificial Sequence
  source: /note="Description of Artificial Sequence: sequence motif"
DYAMH

SEQ ID NO: 1166 - protein, 17 aa, Artificial Sequence
  source: /note="Description of Artificial Sequence: sequence motif"
GISWNSGRKDYADSVKG

SEQ ID NO: 1167 - protein, 18 aa, Artificial Sequence
  source: /note="Description of Artificial Sequence: sequence motif"
EKSLGYCSGGSCSDAFDI

SEQ ID NO: 1168 - protein, 127 aa, Artificial Sequence
  source: /note="Description of Artificial Sequence: IL-17RA binding protein"
QVQLVESGGGLVQPGRSLRLSCAASGFTFDDYAMHWVRQGPGKGLEWVSGISWNSGRKDYADSVKGRFTVSRDNAKNSLFLQMNSLRAEDTALYYCVKEKSLGYCSGGSCSDAFDIWGQGAMVTVSS

SEQ ID NO: 1169 - protein, 5 aa, Artificial Sequence
  source: /note="Description of Artificial Sequence: sequence motif"
DYAMH

SEQ ID NO: 1170 - protein, 17 aa, Artificial Sequence
  source: /note="Description of Artificial Sequence: sequence motif"
GISWNSGRKDYADSVKG

SEQ ID NO: 1171 - protein, 18 aa, Artificial Sequence
  source: /note="Description of Artificial Sequence: sequence motif"
EKSLGYCSGGSCSDAFDI

SEQ ID NO: 1172 - protein, 127 aa, Artificial Sequence
  source: /note="Description of Artificial Sequence: IL-17RA binding protein"
EVQLVESGGGLVQPGGSLRLSCAASGFTFDDYAMHWVRQAPGKGLEWVSGISWNSGRKDYADSVKGRFTVSRDNAKNSLFLQMNSLRAEDTALYYCVKEKSLGYCSGGSCSDAFDIWGQGAMVTVSS

SEQ ID NO: 1173 - protein, 5 aa, Artificial Sequence
  source: /note="Description of Artificial Sequence: sequence motif"
DYAMH

SEQ ID NO: 1174 - protein, 17 aa, Artificial Sequence
  source: /note="Description of Artificial Sequence: sequence motif"
GISWNSGRKDYADSVKG

SEQ ID NO: 1175 - protein, 18 aa, Artificial Sequence
  source: /note="Description of Artificial Sequence: sequence motif"
EKSLGYCSGGTCSDAFDI

SEQ ID NO: 1176 - protein, 127 aa, Artificial Sequence
  source: /note="Description of Artificial Sequence: IL-17RA binding protein"
EVQLVESGGGLVQPGGSLRLSCAASGFTFDDYAMHWVRQAPGKGLEWVSGISWNSGRKDYADSVKGRFTVSRDNAKNSLFLQMNSLRAEDTALYYCVKEKSLGYCSGGTCSDAFDIWGQGTMVTVSS

SEQ ID NO: 1177 - protein, 5 aa, Artificial Sequence
  source: /note="Description of Artificial Sequence: sequence motif"
DYAMH

SEQ ID NO: 1178 - protein, 17 aa, Artificial Sequence
  source: /note="Description of Artificial Sequence: sequence motif"
GISWNSGRKGYADSVKG

SEQ ID NO: 1179 - protein, 18 aa, Artificial Sequence
  source: /note="Description of Artificial Sequence: sequence motif"
ERSLGYCSGGTCADAFDI

SEQ ID NO: 1180 - protein, 127 aa, Artificial Sequence
  source: /note="Description of Artificial Sequence: IL-17RA binding protein"
EVQLVESGGGLVQPGGSLRLSCAASGFIFDDYAMHWVRQAPGKGLEWVSGISWNSGRKGYADSVKGRFTISRDNAKNSLYLQMNSLRABDTALYYCAKERSLGYCSGGTCADAFDIWGQGTMVTVSS

SEQ ID NO: 1181 - protein, 5 aa, Artificial Sequence
  source: /note="Description of Artificial Sequence: sequence motif"
DYAMH

SEQ ID NO: 1182 - protein, 17 aa, Artificial Sequence
  source: /note="Description of Artificial Sequence: sequence motif"
SISWNSGRMGYADSVKG

SEQ ID NO: 1183 - protein, 18 aa, Artificial Sequence
  source: /note="Description of Artificial Sequence: sequence motif"
EKSLGYCSGGTCSDGFDI

SEQ ID NO: 1184 - protein, 127 aa, Artificial Sequence
  source: /note="Description of Artificial Sequence: IL-17RA binding protein"
QVQLVESGGGLVQPGGSLRLSCAASGFTFDDYAMHWVRQAPGKGLEWVSSISWNSGRMGYADSVKGRFIISRDNAKNSLSLQMNSLRAEDTALYYCAKEKSLGYCSGGTCSDGFDIWGQGTMVTVSS

SEQ ID NO: 1185 - protein, 5 aa, Artificial Sequence
  source: /note="Description of Artificial Sequence: sequence motif"
DYAMH

SEQ ID NO: 1186 - protein, 17 aa, Artificial Sequence
  source: /note="Description of Artificial Sequence: sequence motif"
GISWNSGRTDYADSVKG

SEQ ID NO: 1187 - protein, 18 aa, Artificial Sequence
  source: /note="Description of Artificial Sequence: sequence motif"
DPSLGYCSGGSCSDVFDI

SEQ ID NO: 1188 - protein, 127 aa, Artificial Sequence
  source: /note="Description of Artificial Sequence: IL-17RA binding protein"
EVQLVESGGGLVQPGRSLRLSCAASGFPFDDYAMHWVRQAPGKGLEWVSGISWNSGRTDYADSVKGRFTISRDNAKNSLYLQMNSLRVEDTALYYCAKDPSLGYCSGGSCSDVFDIWGQGTMVTVSS

SEQ ID NO: 1189 - protein, 5 aa, Artificial Sequence
  source: /note="Description of Artificial Sequence: sequence motif"
DYAMH

SEQ ID NO: 1190 - protein, 17 aa, Artificial Sequence
  source: /note="Description of Artificial Sequence: sequence motif"
GISWNSGRKDYADSVKG

SEQ ID NO: 1191 - protein, 18 aa, Artificial Sequence
  source: /note="Description of Artificial Sequence: sequence motif"
DPSLVYCSGGTCSDSFDI

SEQ ID NO: 1192 - protein, 127 aa, Artificial Sequence
  source: /note="Description of Artificial Sequence: IL-17RA binding protein"
QVQLVESGGGLVQPGRSLRLSCAASGFTFDDYAMHWVRQPPGKGLEWVSGISWNSGRKDYADSVKGRFTISRDNAKNSLYLQMNSLRVEDTAMYYCVKDPSLVYCSGGTCSDSFDIRGQGTMVTVSS

SEQ ID NO: 1193 - protein, 5 aa, Artificial Sequence
  source: /note="Description of Artificial Sequence: sequence motif"
DYAMH

SEQ ID NO: 1194 - protein, 17 aa, Artificial Sequence
  source: /note="Description of Artificial Sequence: sequence motif"
GISWNSGRKDYADSVKG

SEQ ID NO: 1195 - protein, 18 aa, Artificial Sequence
  source: /note="Description of Artificial Sequence: sequence motif"
DPSLVYCSGGTCSDSFDI

SEQ ID NO: 1196 - protein, 127 aa, Artificial Sequence; identical to SEQ ID NO: 1192
  source: /note="Description of Artificial Sequence: IL-17RA binding protein"

SEQ ID NO: 1197 - protein, 5 aa, Artificial Sequence
  source: /note="Description of Artificial Sequence: sequence motif"
DYAMH

SEQ ID NO: 1198 - protein, 17 aa, Artificial Sequence
  source: /note="Description of Artificial Sequence: sequence motif"
GISWNSGRKDYADSVKG

SEQ ID NO: 1199 - protein, 18 aa, Artificial Sequence
  source: /note="Description of Artificial Sequence: sequence motif"
DPSLVYCSGGTCSDSFDI

SEQ ID NO: 1200 - protein, 127 aa, Artificial Sequence
  source: /note="Description of Artificial Sequence: IL-17RA binding protein"
EVQLVESGGGLVQPGRSLRLSCAASGFTFDDYAMHWVRQPPGKGLEWVSGISWNSGRKDYADSVKGRFTISRDNAKNFLYLQMNSLRAEDTAMYYCVKDPSLVYCSGGTCSDSFDIRGQGTMVTVSS

SEQ ID NO: 1201 - protein, 5 aa, Artificial Sequence
  source: /note="Description of Artificial Sequence: sequence motif"
DYAML

SEQ ID NO: 1202 - protein, 17 aa, Artificial Sequence
  source: /note="Description of Artificial Sequence: sequence motif"
GISWNSGRMDYADSVKG

SEQ ID NO: 1203 - protein, 18 aa, Artificial Sequence
  source: /note="Description of Artificial Sequence: sequence motif"
DPSLGYCSGGTCSDSFDI

SEQ ID NO: 1204 - protein, 127 aa, Artificial Sequence
  source: /note="Description of Artificial Sequence: IL-17RA binding protein"
EVQLVESGGGLVQPGRSLRLSCAASGFTFDDYAMLWVRQPPGKGLEWVSGISWNSGRMDYADSVKGRFTISRDNAKNSLYLQMNSLRTEDTAMYYCVKDPSLGYCSGGTCSDSFDIRGQGTMVTVSS

SEQ ID NO: 1205 - protein, 5 aa, Artificial Sequence
  source: /note="Description of Artificial Sequence: sequence motif"
DYAMH

SEQ ID NO: 1206 - protein, 17 aa, Artificial Sequence
  source: /note="Description of Artificial Sequence: sequence motif"
GISWNSGSIGYADSVKG

SEQ ID NO: 1207 - protein, 18 aa, Artificial Sequence
  source: /note="Description of Artificial Sequence: sequence motif"
DPSLGYCSGGSCSDSFDI

SEQ ID NO: 1208 - protein, 127 aa, Artificial Sequence
  source: /note="Description of Artificial Sequence: IL-17RA binding protein"
QVQLVESGGGLVQPGRSLRLSCAASGFTFDDYAMHWVRQAPGKGLEWVSGISWNSGSIGYADSVKGRFTISRDNAKNSLYLQMNSLRVEDTAMYYCVKDPSLGYCSGGSCSDSFDIRGQGTMVTVSS

SEQ ID NO: 1209 - protein, 5 aa, Artificial Sequence
  source: /note="Description of Artificial Sequence: sequence motif"
DYAMH

SEQ ID NO: 1210 - protein, 17 aa, Artificial Sequence
  source: /note="Description of Artificial Sequence: sequence motif"
GISWNSGSIGYADSVKG

SEQ ID NO: 1211 - protein, 18 aa, Artificial Sequence
  source: /note="Description of Artificial Sequence: sequence motif"
DPSLGYCSGGSCSDSFDI

SEQ ID NO: 1212 - protein, 127 aa, Artificial Sequence; identical to SEQ ID NO: 1208
  source: /note="Description of Artificial Sequence: IL-17RA binding protein"

SEQ ID NO: 1213 - protein, 5 aa, Artificial Sequence
  source: /note="Description of Artificial Sequence: sequence motif"
DYTMH

SEQ ID NO: 1214 - protein, 17 aa, Artificial Sequence
  source: /note="Description of Artificial Sequence: sequence motif"
GISWNSGRKGYADSVKG

SEQ ID NO: 1215 - protein, 18 aa, Artificial Sequence
  source: /note="Description of Artificial Sequence: sequence motif"
EPSLGYCSGGTCSDAFDI

SEQ ID NO: 1216 - protein, 127 aa, Artificial Sequence
  source: /note="Description of Artificial Sequence: IL-17RA binding protein"
QVQLVESGGGLVQPGGSLRLSCAASGFSFDDYTMHWVRQAPGKGLEWVSGISWNSGRKGYADSVKGRFTTSRDNAKNSLYLQMNSLRAEDTALYYCAKEPSLGYCSGGTCSDAFDIWGQGTMVTVSS

SEQ ID NO: 1217 - protein, 5 aa, Artificial Sequence
  source: /note="Description of Artificial Sequence: sequence motif"
DYAMH

SEQ ID NO: 1218 - protein, 17 aa, Artificial Sequence
  source: /note="Description of Artificial Sequence: sequence motif"
GISWNSGRKDYADSVKG

SEQ ID NO: 1219 - protein, 18 aa, Artificial Sequence
  source: /note="Description of Artificial Sequence: sequence motif"
ERSLGYCSGGTCSDAFDI

SEQ ID NO: 1220 - protein, 127 aa, Artificial Sequence
  source: /note="Description of Artificial Sequence: IL-17RA binding protein"
EVQLVESGGGLVQPGRSLRLSCAASGFAFADYAMHWVRQAPGKGLEWVSGISWNSGRKDYADSVKGRFTISRDNAKNSLFLQMNSLRPEDTALYFCAKERSLGYCSGGTCSDAFDIWGQGTMVTVSS

SEQ ID NO: 1221 - protein, 5 aa, Artificial Sequence
  source: /note="Description of Artificial Sequence: sequence motif"
DYAMH

SEQ ID NO: 1222 - protein, 17 aa, Artificial Sequence
  source: /note="Description of Artificial Sequence: sequence motif"
GISWNSGRVDYVDTVKG

SEQ ID NO: 1223 - protein, 18 aa, Artificial Sequence
  source: /note="Description of Artificial Sequence: sequence motif"
ERSLGYCRGGSCSDGFDI

SEQ ID NO: 1224 - protein, 127 aa, Artificial Sequence
  source: /note="Description of Artificial Sequence: IL-17RA binding protein"
QVQLVESGGGLVQPGRSLRLSCAASGFSFDDYAMHWVRQAPGKGLEWVSGISWNSGRVDYVDTVKGRFTISRDNAKNSLYLQMNSLRAEDTALYYCAKERSLGYCRGGSCSDGFDIWGQGTMVTVSS

SEQ ID NO: 1225 - protein, 5 aa, Artificial Sequence
  source: /note="Description of Artificial Sequence: sequence motif"
DYAMH

SEQ ID NO: 1226 - protein, 17 aa, Artificial Sequence
  source: /note="Description of Artificial Sequence: sequence motif"
GISWNGGRIDYADSLKG

SEQ ID NO: 1227 - protein, 18 aa, Artificial Sequence
  source: /note="Description of Artificial Sequence: sequence motif"
DPSLGYCSGGTCSDSFDI

SEQ ID NO: 1228 - protein, 127 aa, Artificial Sequence
  source: /note="Description of Artificial Sequence: IL-17RA binding protein"
EVQLVESGGGLVQPGRSLRLSCAASGFTFGDYAMHWVRQPPGKGLEWVSGISWNGGRIDYADSLKGRFTISRDNANNSLYLQMNSLRAEDTAMYYCVKDPSLGYCSGGTCSDSFDIRGQGTMVTVSS

SEQ ID NO: 1229 - protein, 5 aa, Artificial Sequence
  source: /note="Description of Artificial Sequence: sequence motif"
DYAMH

SEQ ID NO: 1230 - protein, 17 aa, Artificial Sequence
  source: /note="Description of Artificial Sequence: sequence motif"
GISWNGGRIDYADSLKG

SEQ ID NO: 1231 - protein, 18 aa, Artificial Sequence
  source: /note="Description of Artificial Sequence: sequence motif"
DPSLGYCSGGTCSDSFDI

SEQ ID NO: 1232 - protein, 127 aa, Artificial Sequence; identical to SEQ ID NO: 1228
  source: /note="Description of Artificial Sequence: IL-17RA binding protein"

SEQ ID NO: 1233 - protein, 5 aa, Artificial Sequence
  source: /note="Description of Artificial Sequence: sequence motif"
DYAMH

SEQ ID NO: 1234 - protein, 17 aa, Artificial Sequence
  source: /note="Description of Artificial Sequence: sequence motif"
GITWNSGRIDYADSVKG

SEQ ID NO: 1235 - protein, 18 aa, Artificial Sequence
  source: /note="Description of Artificial Sequence: sequence motif"
ERSLGYCRGGPCSDAFDI

SEQ ID NO: 1236 - protein, 127 aa, Artificial Sequence
  source: /note="Description of Artificial Sequence: IL-17RA binding protein"
QVQLVESGGGLVQPGRSLRLSCAASGFTFDDYAMHWVRQAPGKGLEWVSGITWNSGRIDYADSVKGRFTISRDNAKNSLYLQMNSLRTEDTALYYCVKERSLGYCRGGPCSDAFDIWGQGTMVTVSS

SEQ ID NO: 1237 - protein, 5 aa, Artificial Sequence
  source: /note="Description of Artificial Sequence: sequence motif"
EYAMH

SEQ ID NO: 1238 - protein, 17 aa, Artificial Sequence
  source: /note="Description of Artificial Sequence: sequence motif"
GISWNGGRVGYAEPVKG

SEQ ID NO: 1239 - protein, 18 aa, Artificial Sequence
  source: /note="Description of Artificial Sequence: sequence motif"
ERSLGYCSGGSCSDGFDI

SEQ ID NO: 1240 - protein, 127 aa, Artificial Sequence
  source: /note="Description of Artificial Sequence: IL-17RA binding protein"
EVQLVESGGGLVQPGRSLRLSCAASGFNFDEYAMHWVRQAPGKGLEWVSGISWNGGRVGYAEPVKGRFTISRDNAKNSLYLQMNSLRVEDTALYYCAKERSLGYCSGGSCSDGFDIWDQGTLVTVSS

SEQ ID NO: 1241 - protein, 5 aa, Artificial Sequence
  source: /note="Description of Artificial Sequence: sequence motif"
EYAMH

SEQ ID NO: 1242 - protein, 17 aa, Artificial Sequence
  source: /note="Description of Artificial Sequence: sequence motif"
GISWNGGRVDYVDTVKG

SEQ ID NO: 1243 - protein, 18 aa, Artificial Sequence
  source: /note="Description of Artificial Sequence: sequence motif"
ERSLGFCRGGSCSDGFDI

SEQ ID NO: 1244 - protein, 127 aa, Artificial Sequence
  source: /note="Description of Artificial Sequence: IL-17RA binding protein"
QVQLVESGGGLVQPGRSLRLSCAASGFNFDEYAMHWVRQPPGKGLEWVSGISWNGGRVDYVDTVKGRFTISRDNAKNSLYLQTNSLRVEDTAMYYCAKERSLGFCRGGSCSDGFDIWGQGTMVTVSS

SEQ ID NO: 1245 - protein, 5 aa, Artificial Sequence
  source: /note="Description of Artificial Sequence: sequence motif"
DYAMH

SEQ ID NO: 1246 - protein, 17 aa, Artificial Sequence
  source: /note="Description of Artificial Sequence: sequence motif"
GITWNSGRKDYADSVKG

SEQ ID NO: 1247 - protein, 18 aa, Artificial Sequence
  source: /note="Description of Artificial Sequence: sequence motif"
ERSLGYCRGGTCSEPFHI

SEQ ID NO: 1248 - protein, 127 aa, Artificial Sequence
  source: /note="Description of Artificial Sequence: IL-17RA binding protein"
QVQLVESGGGLVQPGRSLRLSCAASGFSFDDYAMHWVRQAPGKGLEWVSGITWNSGRKDYADSVKGRFTISRDNAKNSLYLQMNSLRSEDTALYYCVKERSLGYCRGGTCSEPFHIWGQGTMVTVSS

SEQ ID NO: 1249 - protein, 5 aa, Artificial Sequence
  source: /note="Description of Artificial Sequence: sequence motif"
DYAMH

SEQ ID NO: 1250 - protein, 17 aa, Artificial Sequence
  source: /note="Description of Artificial Sequence: sequence motif"
GITWNGGRMDYADSVKG

SEQ ID NO: 1251 - protein, 18 aa, Artificial Sequence
  source: /note="Description of Artificial Sequence: sequence motif"
ERSLGYCGGDSCSDAFDI

SEQ ID NO: 1252 - protein, 127 aa, Artificial Sequence
  source: /note="Description of Artificial Sequence: IL-17RA binding protein"
EVQLVESGGGLVQPGRSLRLSCAASGFTFDDYAMHWVRQAPGKGLEWVSGITWNGGRMDYADSVKGRFTISRDNAKNSLYLQMHSLRTEDTALYYCTKERSLGYCGGDSCSDAFDIWGQGTMVTVSS

SEQ ID NO: 1253 - protein, 5 aa, Artificial Sequence
  source: /note="Description of Artificial Sequence: sequence motif"
DYAMH

SEQ ID NO: 1254 - protein, 17 aa, Artificial Sequence
  source: /note="Description of Artificial Sequence: sequence motif"
GISWNGGAMDYADSVKG

SEQ ID NO: 1255 - protein, 18 aa, Artificial Sequence
  source: /note="Description of Artificial Sequence: sequence motif"
EKSLGYCRGGSCSDAFDI

SEQ ID NO: 1256 - protein, 127 aa, Artificial Sequence
  source: /note="Description of Artificial Sequence: IL-17RA binding protein"
QVQLVESGGGLVRPGRSLRLSCTASGFTFDDYAMHWVRQAPGKGLEWVSGISWNGGAMDYADSVKGRFTISRDNANNSLYLQMNSLRSEDTALYYCIKEKSLGYCRGGSCSDAFDIWGQGTMVTVSS

SEQ ID NO: 1257 - protein, 5 aa, Artificial Sequence
  source: /note="Description of Artificial Sequence: sequence motif"
DYAMH

SEQ ID NO: 1258 - protein, 17 aa, Artificial Sequence
  source: /note="Description of Artificial Sequence: sequence motif"
GISWNGGAMDYADSVKG

SEQ ID NO: 1259 - protein, 18 aa, Artificial Sequence
  source: /note="Description of Artificial Sequence: sequence motif"
EKSLGYCRGGSCSDAFDI

SEQ ID NO: 1260 - protein, 127 aa, Artificial Sequence
  source: /note="Description of Artificial Sequence: IL-17RA binding protein"
EVQLVESGGGLVQPGRSLRLSCTASGFTFDDYAMHWVRQAPGKGLEWVSGISWNGGAMDYADSVKGRFTISRDNANNSLYLQMNSLRSEDTALYYCIKEKSLGYCRGGSCSDAFDIWGQGTMVTVSS

SEQ ID NO: 1261 - protein, 5 aa, Artificial Sequence
  source: /note="Description of Artificial Sequence: sequence motif"
DYAMH

SEQ ID NO: 1262 - protein, 17 aa, Artificial Sequence
  source: /note="Description of Artificial Sequence: sequence motif"
GITWNGGRKDYADSVKG

SEQ ID NO: 1263 - protein, 18 aa, Artificial Sequence
  source: /note="Description of Artificial Sequence: sequence motif"
ERSLGYCSGGSCSDAFDI

SEQ ID NO: 1264 - protein, 127 aa, Artificial Sequence
  source: /note="Description of Artificial Sequence: IL-17RA binding protein"
EVQLVESGGGLVQPGRSLRLSCAASGFSFDDYAMHWVRQPPGKGLEWVSGITWNGGRKDYADSVKGRFTISRDNAKNSLYLQMNSLRAEDAALYYCVKERSLGYCSGGSCSDAFDIWGQGTMVTVSS

SEQ ID NO: 1265 - protein, 5 aa, Artificial Sequence
  source: /note="Description of Artificial Sequence: sequence motif"
SYDIN

SEQ ID NO: 1266 - protein, 17 aa, Artificial Sequence
  source: /note="Description of Artificial Sequence: sequence motif"
WMNPNSGDTVYAQKFQG

SEQ ID NO: 1267 - protein, 10 aa, Artificial Sequence
  source: /note="Description of Artificial Sequence: sequence motif"
GRRDDWKNNY

SEQ ID NO: 1268 - protein, 119 aa, Artificial Sequence
  source: /note="Description of Artificial Sequence: IL-17RA binding protein"
QVQLVQSGAEVKKPGASVKVSCKASGYPFTSYDINWVRQATGQSLEWMGWMNPNSGDTVYAQKFQGRVTMTRNTSISTAYMELSSLRSEDTAVYFCARGRRDDWKNNYWGQGTLVTVSS

SEQ ID NO: 1269 - protein, 5 aa, Artificial Sequence
  source: /note="Description of Artificial Sequence: sequence motif"
SYDIN

SEQ ID NO: 1270 - protein, 17 aa, Artificial Sequence
  source: /note="Description of Artificial Sequence: sequence motif"
WMNPTNGNTVYAQKFQD

SEQ ID NO: 1271 - protein, 10 aa, Artificial Sequence
  source: /note="Description of Artificial Sequence: sequence motif"
GRRDDWKNNY

SEQ ID NO: 1272 - protein, 119 aa, Artificial Sequence
  source: /note="Description of Artificial Sequence: IL-17RA binding protein"
QVQLVQSGAEVKKPGASVKVSCKASGYPFTSYDINWVRQATGRSLEWMGWMNPTNGNTVYAQKFQDRVTMTRNTSISTAYMELSSLRSEDTAVYFCARGRRDDWKNNYWGQGTLVTVSS

SEQ ID NO: 1273 - protein, 5 aa, Artificial Sequence
  source: /note="Description of Artificial Sequence: sequence motif"
SYDIN

SEQ ID NO: 1274 - protein, 17 aa, Artificial Sequence
  source: /note="Description of Artificial Sequence: sequence motif"
WMNPTSGDTVYAQKFQD

SEQ ID NO: 1275 - protein, 10 aa, Artificial Sequence
  source: /note="Description of Artificial Sequence: sequence motif"
GRRDNWKNNY

SEQ ID NO: 1276 - protein, 119 aa, Artificial Sequence
  source: /note="Description of Artificial Sequence: IL-17RA binding protein"
QVQLVQSGAEVKKPGASVKVSCKASGYPFTSYDINWVRQATGRSLEWMGWMNPTSGDTVYAQKFQDRVTMTRNTSISTAYMELSSLRSEDTAVYFCARGRRDNWKNNYWGQGTLVTVSS

SEQ ID NO: 1277 - protein, 5 aa, Artificial Sequence
  source: /note="Description of Artificial Sequence: sequence motif"
TYDIN

SEQ ID NO: 1278 - protein, 17 aa, Artificial Sequence
  source: /note="Description of Artificial Sequence: sequence motif"
WMNPTNGNTVYAQKFQD

SEQ ID NO: 1279 - protein, 10 aa, Artificial Sequence
  source: /note="Description of Artificial Sequence: sequence motif"
GRRDDWKNNY

SEQ ID NO: 1280 - protein, 119 aa, Artificial Sequence
  source: /note="Description of Artificial Sequence: IL-17RA binding protein"
QVQLVQSGAEVKKPGASVKVSCKASGYPFTTYDINWVRQATGRSLEWMGWMNPTNGNTVYAQKFQDRVTMTRNTSISTAYMELSSLRSEDTAVYFCARGRRDDWKNNYWGQGTLVTVSS

SEQ ID NO: 1281 - protein, 5 aa, Artificial Sequence
  source: /note="Description of Artificial Sequence: sequence motif"
SYDIN

SEQ ID NO: 1282 - protein, 17 aa, Artificial Sequence
  source: /note="Description of Artificial Sequence: sequence motif"
WMNPKNGNTVYAQKFQD

SEQ ID NO: 1283 - protein, 10 aa, Artificial Sequence
  source: /note="Description of Artificial Sequence: sequence motif"
GIRDDWKNNY

SEQ ID NO: 1284 - protein, 119 aa, Artificial Sequence
  source: /note="Description of Artificial Sequence: IL-17RA binding protein"
QVQLVQSGAEVKKPGASVKVSCKASGYPFTSYDINWVRQATGRSLEWMGWMNPKNGNTVYAQKFQDRVTMTRNTSISTAYMELSSLRSEDTAVYFCARGIRDDWKNNYWGQGTLVTVSS

SEQ ID NO: 1285 - protein, 5 aa, Artificial Sequence
  source: /note="Description of Artificial Sequence: sequence motif"
SYDIN

SEQ ID NO: 1286 - protein, 17 aa, Artificial Sequence
  source: /note="Description of Artificial Sequence: sequence motif"
WMNPTNGNTVYAQKFQD

SEQ ID NO: 1287 - protein, 10 aa, Artificial Sequence
  source: /note="Description of Artificial Sequence: sequence motif"
GRRDDWKNNY

SEQ ID NO: 1288 - protein, 119 aa, Artificial Sequence
  source: /note="Description of Artificial Sequence: IL-17RA binding protein"
QVQLVQSGAEVKKPGASVKVSCKASGYPFTSYDINWVRQATGQSLEWMGWMNPTNGNTVYAQKFQDRVTMTRNTSISTAYMELSSLRSEDTAVYFCARGRRDDWKNNYWGQGTLVTVSS

SEQ ID NO: 1289 - protein, 5 aa, Artificial Sequence
  source: /note="Description of Artificial Sequence: sequence motif"
SYDIN

SEQ ID NO: 1290 - protein, 17 aa, Artificial Sequence
  source: /note="Description of Artificial Sequence: sequence motif"
WMNPGSGDTVYAQKFQG

SEQ ID NO: 1291 - protein, 10 aa, Artificial Sequence
  source: /note="Description of Artificial Sequence: sequence motif"
GRRDDWKNNY

SEQ ID NO: 1292 - protein, 119 aa, Artificial Sequence
  source: /note="Description of Artificial Sequence: IL-17RA binding protein"
QVQLVQSGAEVKKPGASVKVSCKASGYPFTSYDINWVRQATGRSLEWMGWMNPGSGDTVYAQKFQGRVTMTRNTSISTAYMELSSLRSEDTAVYFCARGRRDDWKNNYWGQGTLVTVSS

SEQ ID NO: 1293 - protein, 5 aa, Artificial Sequence
  source: /note="Description of Artificial Sequence: sequence motif"
TYDIN

SEQ ID NO: 1294 - protein, 17 aa, Artificial Sequence
  source: /note="Description of Artificial Sequence: sequence motif"
WMNPENGDTVYAQKFQG

SEQ ID NO: 1295 - protein, 10 aa, Artificial Sequence
  source: /note="Description of Artificial Sequence: sequence motif"
GRRDNWKNNY

SEQ ID NO: 1296 - protein, 119 aa, Artificial Sequence
  source: /note="Description of Artificial Sequence: IL-17RA binding protein"
QVQLVQSGAEVKKPGASVKVSCKASGYPFTTYDINWVRQATGRSLEWMGWMNPENGDTVYAQKFQGRVTMTRNTSISTAYMELSSLRSEDTAVYFCARGRRDNWKNNYWGQGTLVTVSS

SEQ ID NO: 1297 - protein, 5 aa, Artificial Sequence
  source: /note="Description of Artificial Sequence: sequence motif"
TYDIN

SEQ ID NO: 1298 - protein, 17 aa, Artificial Sequence
  source: /note="Description of Artificial Sequence: sequence motif"
WMNPTNGDTVYAQKFQG

SEQ ID NO: 1299 - protein, 10 aa, Artificial Sequence
  source: /note="Description of Artificial Sequence: sequence motif"
GRRDDWKNNY

SEQ ID NO: 1300 - protein, 119 aa, Artificial Sequence
  source: /note="Description of Artificial Sequence: IL-17RA binding protein"
QVQLVQSGAEVKKPGASVKVSCKASGYPFTTYDINWVRQATGQSLEWMGWMNPTNGDTVYAQKFQGRVTMTRNTSISTAYMELSSLRSEDTAVYFCARGRRDDWKNNYWGQGTLVTVSS

SEQ ID NO: 1301 - protein, 5 aa, Artificial Sequence
  source: /note="Description of Artificial Sequence: sequence motif"
SYDIN

SEQ ID NO: 1302 - protein, 17 aa, Artificial Sequence
  source: /note="Description of Artificial Sequence: sequence motif"
WMNPTSGDTVYAQKFQD

SEQ ID NO: 1303 - protein, 10 aa, Artificial Sequence
  source: /note="Description of Artificial Sequence: sequence motif"
GIRDDWKNNY

SEQ ID NO: 1304 - protein, 119 aa, Artificial Sequence
  source: /note="Description of Artificial Sequence: IL-17RA binding protein"
QVQLVQSGAEVKKPGASVKVSCKASGYPFTSYDINWVRQATGQSLEWMGWMNPTSGDTVYAQKFQDRVTMTRNTSISTAYMELSSLRSEDTAVYFCARGIRDDWKNNYWGQGTLVTVSS

SEQ ID NO: 1305 - protein, 5 aa, Artificial Sequence
  source: /note="Description of Artificial Sequence: sequence motif"
SYDIN

SEQ ID NO: 1306 - protein, 17 aa, Artificial Sequence
  source: /note="Description of Artificial Sequence: sequence motif"
WMNPTNGYTVYAQKFQD

SEQ ID NO: 1307 - protein, 10 aa, Artificial Sequence
  source: /note="Description of Artificial Sequence: sequence motif"
GRRDDWKNNY

SEQ ID NO: 1308 - protein, 119 aa, Artificial Sequence
  source: /note="Description of Artificial Sequence: IL-17RA binding protein"
QVQLVQSGAEVKKPGASVKVSCKASGYPFTSYDINWVRQATGQSLEWMGWMNPTNGYTVYAQKFQDRVTMTRNTSISTAYMELSSLRSEDTAVYFCARGRRDDWKNNYWGQGTLVTVSS

SEQ ID NO: 1309 - protein, 5 aa, Artificial Sequence
  source: /note="Description of Artificial Sequence: sequence motif"
TYDIN

SEQ ID NO: 1310 - protein, 17 aa, Artificial Sequence
  source: /note="Description of Artificial Sequence: sequence motif"
WMNPTNGNTVYAQKFQG

SEQ ID NO: 1311 - protein, 10 aa, Artificial Sequence
  source: /note="Description of Artificial Sequence: sequence motif"
GRRDDWKNNY

SEQ ID NO: 1312 - protein, 119 aa, Artificial Sequence
  source: /note="Description of Artificial Sequence: IL-17RA binding protein"
QVQLVQSGAEVKKPGASVKVSCKASGYPFTTYDINWVRQATGRSLEWMGWMNPTNGNTVYAQKFQGRVTMTRNTSISTAYMELSSLRSEDTAVYFCARGRRDDWKNNYWGQGTLVTVSS

SEQ ID NO: 1313 - protein, 5 aa, Artificial Sequence
  source: /note="Description of Artificial Sequence: sequence motif"
SYDIN

SEQ ID NO: 1314 - protein, 17 aa, Artificial Sequence
  source: /note="Description of Artificial Sequence: sequence motif"
WMNPTSGDTVYAQKFQG

SEQ ID NO: 1315 - protein, 10 aa, Artificial Sequence
  source: /note="Description of Artificial Sequence: sequence motif"
GRRDDWKNNY

SEQ ID NO: 1316 - protein, 119 aa, Artificial Sequence
  source: /note="Description of Artificial Sequence: IL-17RA binding protein"
QVQLVQSGAEVKKPGASVKVSCKASGYPFTSYDINWVRQATGQSLEWMGWMNPTSGDTVYAQKFQGRVTMTRNTSISTAYMELSSLRSEDTAVYFCARGRRDDWKNNYWGQGTLVTVSS

SEQ ID NO: 1317 - protein, 5 aa, Artificial Sequence
  source: /note="Description of Artificial Sequence: sequence motif"
SYDIN

SEQ ID NO: 1318 - protein, 17 aa, Artificial Sequence
  source: /note="Description of Artificial Sequence: sequence motif"
WMNPESGYTVYAQKFQG

SEQ ID NO: 1319 - protein, 10 aa, Artificial Sequence
  source: /note="Description of Artificial Sequence: sequence motif"
GRRDDWKNNY

SEQ ID NO: 1320 - protein, 119 aa, Artificial Sequence
  source: /note="Description of Artificial Sequence: IL-17RA binding protein"
QVQLVQSGAEVKKPGASVKVSCKASGYPFTSYDINWVRQATGRSLEWMGWMNPESGYTVYAQKFQGRVTMTRNTSISTAYMELSSLRSEDTAVYFCARGRRDDWKNNYWGQGTLVTVSS

SEQ ID NO: 1321 - protein, 5 aa, Artificial Sequence
  source: /note="Description of Artificial Sequence: sequence motif"
TYDIN

SEQ ID NO: 1322 - protein, 17 aa, Artificial Sequence
  source: /note="Description of Artificial Sequence: sequence motif"
WMNPTSGYTVYAQKFQD

SEQ ID NO: 1323 - protein, 10 aa, Artificial Sequence
  source: /note="Description of Artificial Sequence: sequence motif"
GIRDDWKNNY

SEQ ID NO: 1324 - protein, 119 aa, Artificial Sequence
  source: /note="Description of Artificial Sequence: IL-17RA binding protein"
QVQLVQSGAEVKKPGASVKVSCKASGYPFTTYDINWVRQATGQSLEWMGWMNPTSGYTVYAQKFQDRVTMTRNTSISTAYMELSSLRSEDTAVYFCARGIRDDWKNNYWGQGTLVTVSS

SEQ ID NO: 1325 - protein, 5 aa, Artificial Sequence
  source: /note="Description of Artificial Sequence: sequence motif"
SYDIN

SEQ ID NO: 1326 - protein, 17 aa, Artificial Sequence
  source: /note="Description of Artificial Sequence: sequence motif"
WMNPTSGYTVYAQKFQD

SEQ ID NO: 1327 - protein, 10 aa, Artificial Sequence
  source: /note="Description of Artificial Sequence: sequence motif"
GRRDDWKNNY

SEQ ID NO: 1328 - protein, 119 aa, Artificial Sequence
  source: /note="Description of Artificial Sequence: IL-17RA binding protein"
QVQLVQSGAEVKKPGASVKVSCKASGYPFTSYDINWVRQATGQSLEWMGWMNPTSGYTVYAQKFQDRVTMTRNTSISTAYMELSSLRSEDTAVYFCARGRRDDWKNNYWGQGTLVTVSS

SEQ ID NO: 1329 - protein, 5 aa, Artificial Sequence
  source: /note="Description of Artificial Sequence: sequence motif"
TYDIN

SEQ ID NO: 1330 - protein, 17 aa, Artificial Sequence
  source: /note="Description of Artificial Sequence: sequence motif"
WMNPKNGNTVYAQKFQD

SEQ ID NO: 1331 - protein, 10 aa, Artificial Sequence
  source: /note="Description of Artificial Sequence: sequence motif"
GRRDDWKNNY

SEQ ID NO: 1332 - protein, 119 aa, Artificial Sequence
  source: /note="Description of Artificial Sequence: IL-17RA binding protein"
QVQLVQSGAEVKKPGASVKVSCKASGYPFTTYDINWVRQATGRSLEWMGWMNPKNGNTVYAQKFQDRVTMTRNTSISTAYMELSSLRSEDTAVYFCARGRRDDWKNNYWGQGTLVTVSS

SEQ ID NO: 1333 - protein, 5 aa, Artificial Sequence
  source: /note="Description of Artificial Sequence: sequence motif"
TYDIN

SEQ ID NO: 1334 - protein, 17 aa, Artificial Sequence
  source: /note="Description of Artificial Sequence: sequence motif"
WMNPTSGDTVYAQKFQG

SEQ ID NO: 1335 - protein, 10 aa, Artificial Sequence
  source: /note="Description of Artificial Sequence: sequence motif"
GRRDDWKNNY

SEQ ID NO: 1336 - protein, 119 aa, Artificial Sequence
  source: /note="Description of Artificial Sequence: IL-17RA binding protein"
QVQLVQSGAEVKKPGASVKVSCKASGYPFTTYDINWVRQATGRSLEWMGWMNPTSGDTVYAQKFQGRVTMTRNTSISTAYMELSSLRSEDTAVYFCARGRRDDWKNNYWGQGTLVTVSS

SEQ ID NO: 1337 - protein, 5 aa, Artificial Sequence
  source: /note="Description of Artificial Sequence: sequence motif"
TYDIN

SEQ ID NO: 1338 - protein, 17 aa, Artificial Sequence
  source: /note="Description of Artificial Sequence: sequence motif"
WMNPESGDTVYAQKFQG

SEQ ID NO: 1339 - protein, 10 aa, Artificial Sequence
  source: /note="Description of Artificial Sequence: sequence motif"
GRRDDWKNNY

SEQ ID NO: 1340 - protein, 119 aa, Artificial Sequence
  source: /note="Description of Artificial Sequence: IL-17RA binding protein"
QVQLVQSGAEVKKPGASVKVSCKASGYPFTTYDINWVRQATGQSLEWMGWMNPESGDTVYAQKFQGRVTMTRNTSISTAYMELSSLRSEDTAVYFCARGRRDDWKNNYWGQGTLVTVSS

SEQ ID NO: 1341 - protein, 5 aa, Artificial Sequence
  source: /note="Description of Artificial Sequence: sequence motif"
SYDIN

SEQ ID NO: 1342 - protein, 17 aa, Artificial Sequence
  source: /note="Description of Artificial Sequence: sequence motif"
WMNPTNGDTVYAQKFQG

SEQ ID NO: 1343 - protein, 10 aa, Artificial Sequence
  source: /note="Description of Artificial Sequence: sequence motif"
GRRDDWKNNY

SEQ ID NO: 1344 - protein, 119 aa, Artificial Sequence
  source: /note="Description of Artificial Sequence: IL-17RA binding protein"
QVQLVQSGAEVKKPGASVKVSCKASGYPFTSYDINWVRQATGRSLEWMGWMNPTNGDTVYAQKFQGRVTMTRNTSISTAYMELSSLRSEDTAVYFCARGRRDDWKNNYWGQGTLVTVSS

SEQ ID NO: 1345 - protein, 5 aa, Artificial Sequence
  source: /note="Description of Artificial Sequence: sequence motif"
TYDIN

SEQ ID NO: 1346 - protein, 17 aa, Artificial Sequence
  source: /note="Description of Artificial Sequence: sequence motif"
WMNPASGYTVYAQKFQD

SEQ ID NO: 1347 - protein, 10 aa, Artificial Sequence
  source: /note="Description of Artificial Sequence: sequence motif"
GRRDDWKNNY

SEQ ID NO: 1348 - protein, 119 aa, Artificial Sequence
  source: /note="Description of Artificial Sequence: IL-17RA binding protein"
QVQLVQSGAEVKKPGASVKVSCKASGYPFTTYDINWVRQATGRSLEWMGWMNPASGYTVYAQKFQDRVTMTRNTSISTAYMELSSLRSEDTAVYFCARGRRDDWKNNYWGQGTLVTVSS

SEQ ID NO: 1349 - protein, 5 aa, Artificial Sequence
  source: /note="Description of Artificial Sequence: sequence motif"
TYDIN

SEQ ID NO: 1350 - protein, 17 aa, Artificial Sequence
  source: /note="Description of Artificial Sequence: sequence motif"
WMNPESGNTVYAQKFQG

SEQ ID NO: 1351 - protein, 10 aa, Artificial Sequence
  source: /note="Description of Artificial Sequence: sequence motif"
GIRDNWKNNY

SEQ ID NO: 1352 - protein, 119 aa, Artificial Sequence
  source: /note="Description of Artificial Sequence: IL-17RA binding protein"
QVQLVQSGAEVKKPGASVKVSCKASGYPFTTYDINWVRQATGRSLEWMGWMNPESGNTVYAQKFQGRVTMTRNTSISTAYMELSSLRSEDTAVYFCARGIRDNWKNNYWGQGTLVTVSS

SEQ ID NO: 1353 - protein, 5 aa, Artificial Sequence
  source: /note="Description of Artificial Sequence: sequence motif"
SYDIN

SEQ ID NO: 1354 - protein, 17 aa, Artificial Sequence
  source: /note="Description of Artificial Sequence: sequence motif"
WMNPKSGNTVYAQKFQD

SEQ ID NO: 1355 - protein, 10 aa, Artificial Sequence
  source: /note="Description of Artificial Sequence: sequence motif"
GRRDDWKNNY

SEQ ID NO: 1356 - protein, 119 aa, Artificial Sequence
  source: /note="Description of Artificial Sequence: IL-17RA binding protein"
QVQLVQSGAEVKKPGASVKVSCKASGYPFTSYDINWVRQATGRSLEWMGWMNPKSGNTVYAQKFQDRVTMTRNTSISTAYMELSSLRSEDTAVYFCARGRRDDWKNNYWGQGTLVTVSS

SEQ ID NO: 1357 - protein, 5 aa, Artificial Sequence
  source: /note="Description of Artificial Sequence: sequence motif"
SYDIN

SEQ ID NO: 1358 - protein, 17 aa, Artificial Sequence
  source: /note="Description of Artificial Sequence: sequence motif"
WMNPASGYTVYAQKFQD

SEQ ID NO: 1359 - protein, 10 aa, Artificial Sequence
  source: /note="Description of Artificial Sequence: sequence motif"
GRRDDWKNNY

SEQ ID NO: 1360 - protein, 119 aa, Artificial Sequence
  source: /note="Description of Artificial Sequence: IL-17RA binding protein"
QVQLVQSGAEVKKPGASVKVSCKASGYPFTSYDINWVRQATGQSLEWMGWMNPASGYTVYAQKFQDRVTMTRNTSISTAYMELSSLRSEDTAVYFCARGRRDDWKNNYWGQGTLVTVSS

SEQ ID NO: 1361 - protein, 5 aa, Artificial Sequence
  source: /note="Description of Artificial Sequence: sequence motif"
SYDIN

SEQ ID NO: 1362 - protein, 17 aa, Artificial Sequence
  source: /note="Description of Artificial Sequence: sequence motif"
WMNPTNGNTVYAQKFQD

SEQ ID NO: 1363 - protein, 10 aa, Artificial Sequence
  source: /note="Description of Artificial Sequence: sequence motif"
GRRDDWKNNY

SEQ ID NO: 1364 - protein, 119 aa, Artificial Sequence; identical to SEQ ID NO: 1288
  source: /note="Description of Artificial Sequence: IL-17RA binding protein"

SEQ ID NO: 1365 - protein, 5 aa, Artificial Sequence
  source: /note="Description of Artificial Sequence: sequence motif"
SYDIN

SEQ ID NO: 1366 - protein, 17 aa, Artificial Sequence
  source: /note="Description of Artificial Sequence: sequence motif"
WMNPTSGDTVYAQKFQG

SEQ ID NO: 1367 - protein, 10 aa, Artificial Sequence
  source: /note="Description of Artificial Sequence: sequence motif"
GRRDDWKNNY

SEQ ID NO: 1368 - protein, 119 aa, Artificial Sequence; identical to SEQ ID NO: 1316
  source: /note="Description of Artificial Sequence: IL-17RA binding protein"

SEQ ID NO: 1369 - protein, 5 aa, Artificial Sequence
  source: /note="Description of Artificial Sequence: sequence motif"
SYDIN

SEQ ID NO: 1370 - protein, 17 aa, Artificial Sequence
  source: /note="Description of Artificial Sequence: sequence motif"
WMNPTNGDTVYAQKFQD

SEQ ID NO: 1371 - protein, 10 aa, Artificial Sequence
  source: /note="Description of Artificial Sequence: sequence motif"
GRRDDWKNNY

SEQ ID NO: 1372 - protein, 119 aa, Artificial Sequence
  source: /note="Description of Artificial Sequence: IL-17RA binding protein"
QVQLVQSGAEVKKPGASVKVSCKASGYPFTSYDINWVRQATGQSLEWMGWMNPTNGDTVYAQKFQDRVTMTRNTSISTAYMELSSLRSEDTAVYFCARGRRDDWKNNYWGQGTLVTVSS

SEQ ID NO: 1373 - protein, 5 aa, Artificial Sequence
  source: /note="Description of Artificial Sequence: sequence motif"
SYDIN

SEQ ID NO: 1374 - protein, 17 aa, Artificial Sequence
  source: /note="Description of Artificial Sequence: sequence motif"
WMNPNSGDTVYAQKFQG

SEQ ID NO: 1375 - protein, 10 aa, Artificial Sequence
  source: /note="Description of Artificial Sequence: sequence motif"
GRRDDWKNNY

SEQ ID NO: 1376 - protein, 119 aa, Artificial Sequence
  source: /note="Description of Artificial Sequence: IL-17RA binding protein"
QVQLVQSGAEVKKPGASVKVSCKASGYPFTSYDINWVRQATGRSLEWMGWMNPNSGDTVYAQKFQGRVTMTRNTSISTAYMELSSLRSEDTAVYFCARGRRDDWKNNYWGQGTLVTVSS

SEQ ID NO: 1377 - protein, 5 aa, Artificial Sequence
  source: /note="Description of Artificial Sequence: sequence motif"
SYDIN

SEQ ID NO: 1378 - protein, 17 aa, Artificial Sequence
  source: /note="Description of Artificial Sequence: sequence motif"
WMNPTNGNTVYAQKFQD

SEQ ID NO: 1379 - protein, 10 aa, Artificial Sequence
  source: /note="Description of Artificial Sequence: sequence motif"
GRRDDWKNNY

SEQ ID NO: 1380 - protein, 119 aa, Artificial Sequence; identical to SEQ ID NO: 1272
  source: /note="Description of Artificial Sequence: IL-17RA binding protein"

SEQ ID NO: 1381 - protein, 5 aa, Artificial Sequence
  source: /note="Description of Artificial Sequence: sequence motif"
SYDIN

SEQ ID NO: 1382 - protein, 17 aa, Artificial Sequence
  source: /note="Description of Artificial Sequence: sequence motif"
WMNPTNGNTVYAQKFQG

SEQ ID NO: 1383 - protein, 10 aa, Artificial Sequence
  source: /note="Description of Artificial Sequence: sequence motif"
GIRDDWKNNY

SEQ ID NO: 1384 - protein, 119 aa, Artificial Sequence
  source: /note="Description of Artificial Sequence: IL-17RA binding protein"
QVQLVQSGAEVKKPGASVKVSCKASGYPFTSYDINWVRQATGQSLEWMGWMNPTNGNTVYAQKFQGRVTMTRNTSISTAYMELSSLRSEDTAVYFCARGIRDDWKNNYWGQGTLVTVSS

SEQ ID NO: 1385 - protein, 5 aa, Artificial Sequence
  source: /note="Description of Artificial Sequence: sequence motif"
SYDIN

SEQ ID NO: 1386 - protein, 17 aa, Artificial Sequence
  source: /note="Description of Artificial Sequence: sequence motif"
WMNPTNGYTVYAQKFQD

SEQ ID NO: 1387 - protein, 10 aa, Artificial Sequence
  source: /note="Description of Artificial Sequence: sequence motif"
GRRDDWKNNY

SEQ ID NO: 1388 - protein, 119 aa, Artificial Sequence; identical to SEQ ID NO: 1308
  source: /note="Description of Artificial Sequence: IL-17RA binding protein"

SEQ ID NO: 1389 - protein, 5 aa, Artificial Sequence
  source: /note="Description of Artificial Sequence: sequence motif"
TYDIN

SEQ ID NO: 1390 - protein, 17 aa, Artificial Sequence
  source: /note="Description of Artificial Sequence: sequence motif"
WMNPTSGYTVYAQKFQD

SEQ ID NO: 1391 - protein, 10 aa, Artificial Sequence
  source: /note="Description of Artificial Sequence: sequence motif"
GRRDDWKNNY

SEQ ID NO: 1392 - protein, 119 aa, Artificial Sequence
  source: /note="Description of Artificial Sequence: IL-17RA binding protein"
QVQLVQSGAEVKKPGASVKVSCKASGYPFTTYDINWVRQATGQSLEWMGWMNPTSGYTVYAQKFQDRVTMTRNTSISTAYMELSSLRSEDTAVYFCARGRRDDWKNNYWGQGTLVTVSS

SEQ ID NO: 1393 - protein, 5 aa, Artificial Sequence
  source: /note="Description of Artificial Sequence: sequence motif"
TYDIN

SEQ ID NO: 1394 - protein, 17 aa, Artificial Sequence
  source: /note="Description of Artificial Sequence: sequence motif"
WMNPTNGNTVYAQKFQD

SEQ ID NO: 1395 - protein, 10 aa, Artificial Sequence
  source: /note="Description of Artificial Sequence: sequence motif"
GIRDDWKNNY

SEQ ID NO: 1396 - protein, 119 aa, Artificial Sequence
  source: /note="Description of Artificial Sequence: IL-17RA binding protein"
QVQLVQSGAEVKKPGASVKVSCKASGYPFTTYDINWVRQATGQSLEWMGWMNPTNGNTVYAQKFQDRVTMTRNTSISTAYMELSSLRSEDTAVYFCARGIRDDWKNNYWGQGTLVTVSS

SEQ ID NO: 1397 - protein, 5 aa, Artificial Sequence
  source: /note="Description of Artificial Sequence: sequence motif"
SYDIN

SEQ ID NO: 1398 - protein, 17 aa, Artificial Sequence
  source: /note="Description of Artificial Sequence: sequence motif"
WMNPTNGYTVYAQKFQG

SEQ ID NO: 1399 - protein, 10 aa, Artificial Sequence
  source: /note="Description of Artificial Sequence: sequence motif"
GRRDDWKNNY

SEQ ID NO: 1400 - protein, 119 aa, Artificial Sequence
  source: /note="Description of Artificial Sequence: IL-17RA binding protein"
QVQLVQSGAEVKKPGASVKVSCKASGYPFTSYDINWVRQATGQSLEWMGWMNPTNGYTVYAQKFQGRVTMTRNTSISTAYMELSSLRSEDTAVYFCARGRRDDWKNNYWGQGTLVTVSS

SEQ ID NO: 1401 - protein, 5 aa, Artificial Sequence
  source: /note="Description of Artificial Sequence: sequence motif"
SYDIN

SEQ ID NO: 1402 - protein, 17 aa, Artificial Sequence
  source: /note="Description of Artificial Sequence: sequence motif"
WMNPGSGDTVYAQKFQG

SEQ ID NO: 1403 - protein, 10 aa, Artificial Sequence
  source: /note="Description of Artificial Sequence: sequence motif"
GRRDDWKNNY

SEQ ID NO: 1404 - protein, 119 aa, Artificial Sequence; identical to SEQ ID NO: 1292
  source: /note="Description of Artificial Sequence: IL-17RA binding protein"

SEQ ID NO: 1405 - protein, 5 aa, Artificial Sequence
  source: /note="Description of Artificial Sequence: sequence motif"
SYDIN

SEQ ID NO: 1406 - protein, 17 aa, Artificial Sequence
  source: /note="Description of Artificial Sequence: sequence motif"
WMNPTSGDTVYAQKFQD

SEQ ID NO: 1407 - protein, 10 aa, Artificial Sequence
  source: /note="Description of Artificial Sequence: sequence motif"
GRRDDWKNNY

SEQ ID NO: 1408 - protein, 119 aa, Artificial Sequence
  source: /note="Description of Artificial Sequence: IL-17RA binding protein"
QVQLVQSGAEVKKPGASVKVSCKASGYPFTSYDINWVRQATGQSLEWMGWMNPTSGDTVYAQKFQDRVTMTRNTSISTAYMELSSLRSEDTAVYFCARGRRDDWKNNYWGQGTLVTVSS

SEQ ID NO: 1409 - protein, 5 aa, Artificial Sequence
  source: /note="Description of Artificial Sequence: sequence motif"
SYDIN

SEQ ID NO: 1410 - protein, 17 aa, Artificial Sequence
  source: /note="Description of Artificial Sequence: sequence motif"
WMNPKNGNTVYAQKFQD

SEQ ID NO: 1411 - protein, 10 aa, Artificial Sequence
  source: /note="Description of Artificial Sequence: sequence motif"
GRRDDWKNNY

SEQ ID NO: 1412 - protein, 119 aa, Artificial Sequence
  source: /note="Description of Artificial Sequence: IL-17RA binding protein"
QVQLVQSGAEVKKPGASVKVSCKASGYPFTSYDINWVRQATGQSLEWMGWMNPKNGNTVYAQKFQDRVTMTRNTSISTAYMELSSLRSEDTAVYFCARGRRDDWKNNYWGQGTLVTVSS

SEQ ID NO: 1413 - protein, 5 aa, Artificial Sequence
  source: /note="Description of Artificial Sequence: sequence motif"
TYDIN

SEQ ID NO: 1414 - protein, 17 aa, Artificial Sequence
  source: /note="Description of Artificial Sequence: sequence motif"
WMNPTNGNTVYAQKFQD

SEQ ID NO: 1415 - protein, 10 aa, Artificial Sequence
  source: /note="Description of Artificial Sequence: sequence motif"
GRRDDWKNNY

SEQ ID NO: 1416 - protein, 119 aa, Artificial Sequence
  source: /note="Description of Artificial Sequence: IL-17RA binding protein"
QVQLVQSGAEVKKPGASVKVSCKASGYPFTTYDINWVRQATGQSLEWMGWMNPTNGNTVYAQKFQDRVTMTRNTSISTAYMELSSLRSEDTAVYFCARGRRDDWKNNYWGQGTLVTVSS

SEQ ID NO: 1417 - protein, 5 aa, Artificial Sequence
  source: /note="Description of Artificial Sequence: sequence motif"
SYDIN

SEQ ID NO: 1418 - protein, 17 aa, Artificial Sequence
  source: /note="Description of Artificial Sequence: sequence motif"
WMNPDNGYTVYAQKFQG

SEQ ID NO: 1419 - protein, 10 aa, Artificial Sequence
  source: /note="Description of Artificial Sequence: sequence motif"
GRRDDWKNNY

SEQ ID NO: 1420 - protein, 119 aa, Artificial Sequence
  source: /note="Description of Artificial Sequence: IL-17RA binding protein"
QVQLVQSGAEVKKPGASVKVSCKASGYPFTSYDINWVRQATGRSLEWMGWMNPDNGYTVYAQKFQGRVTMTRNTSISTAYMELSSLRSEDTAVYFCARGRRDDWKNNYWGQGTLVTVSS

SEQ ID NO: 1421 - protein, 5 aa, Artificial Sequence
  source: /note="Description of Artificial Sequence: sequence motif"
SYDIN

SEQ ID NO: 1422 - protein, 17 aa, Artificial Sequence
  source: /note="Description of Artificial Sequence: sequence motif"
WMNPESGYTVYAQKFQD

SEQ ID NO: 1423 - protein, 10 aa, Artificial Sequence
  source: /note="Description of Artificial Sequence: sequence motif"
GRRDDWKNNY

SEQ ID NO: 1424 - protein, 119 aa, Artificial Sequence
  source: /note="Description of Artificial Sequence: IL-17RA binding protein"
QVQLVQSGAEVKKPGASVKVSCKASGYPFTSYDINWVRQATGQSLEWMGWMNPESGYTVYAQKFQDRVTMTRNTSISTAYMELSSLRSEDTAVYFCARGRRDDWKNNYWGQGTLVTVSS

SEQ ID NO: 1425 - protein, 5 aa, Artificial Sequence
  source: /note="Description of Artificial Sequence: sequence motif"
SYDIN

SEQ ID NO: 1426 - protein, 17 aa, Artificial Sequence
  source: /note="Description of Artificial Sequence: sequence motif"
WMNPNNGNTVYAQKFQD

SEQ ID NO: 1427 - protein, 10 aa, Artificial Sequence
  source: /note="Description of Artificial Sequence: sequence motif"
GRRDDWKNNY

SEQ ID NO: 1428 - protein, 119 aa, Artificial Sequence
  source: /note="Description of Artificial Sequence: IL-17RA binding protein"
QVQLVQSGAEVKKPGASVKVSCKASGYPFTSYDINWVRQATGQSLEWMGWMNPNNGNTVYAQKFQDRVTMTRNTSISTAYMELSSLRSEDTAVYFCARGRRDDWKNNYWGQGTLVTVSS

SEQ ID NO: 1429 - protein, 5 aa, Artificial Sequence
  source: /note="Description of Artificial Sequence: sequence motif"
SYDIN

SEQ ID NO: 1430 - protein, 17 aa, Artificial Sequence
  source: /note="Description of Artificial Sequence: sequence motif"
WMNPENGNTVYAQKFQD

SEQ ID NO: 1431 - protein, 10 aa, Artificial Sequence
  source: /note="Description of Artificial Sequence: sequence motif"
GRRDDWKNNY

SEQ ID NO: 1432 - protein, 119 aa, Artificial Sequence
  source: /note="Description of Artificial Sequence: IL-17RA binding protein"
QVQLVQSGAEVKKPGASVKVSCKASGYPFTSYDINWVRQATGQSLEWMGWMNPENGNTVYAQKFQDRVTMTRNTSISTAYMELSSLRSEDTAVYFCARGRRDDWKNNYWGQGTLVTVSS

SEQ ID NO: 1433 - protein, 5 aa, Artificial Sequence
  source: /note="Description of Artificial Sequence: sequence motif"
TYDIN

SEQ ID NO: 1434 - protein, 17 aa, Artificial Sequence
  source: /note="Description of Artificial Sequence: sequence motif"
WMNPTNGDTVYAQKFQD

SEQ ID NO: 1435 - protein, 10 aa, Artificial Sequence
  source: /note="Description of Artificial Sequence: sequence motif"
GRRDDWKNNY

SEQ ID NO: 1436 - protein, 119 aa, Artificial Sequence
  source: /note="Description of Artificial Sequence: IL-17RA binding protein"
QVQLVQSGAEVKKPGASVKVSCKASGYPFTTYDINWVRQATGQSLEWMGWMNPTNGDTVYAQKFQDRVTMTRNTSISTAYMELSSLRSEDTAVYFCARGRRDDWKNNYWGQGTLVTVSS

SEQ ID NO: 1437 - protein, 5 aa, Artificial Sequence
  source: /note="Description of Artificial Sequence: sequence motif"
SYDIN

SEQ ID NO: 1438 - protein, 17 aa, Artificial Sequence
  source: /note="Description of Artificial Sequence: sequence motif"
WMNPTNGNTVYAQKFQD

SEQ ID NO: 1439 - protein, 10 aa, Artificial Sequence
  source: /note="Description of Artificial Sequence: sequence motif"
GRRDDWKNNY

SEQ ID NO: 1440 - protein, 119 aa, Artificial Sequence; identical to SEQ ID NO: 1288
  source: /note="Description of Artificial Sequence: IL-17RA binding protein"

SEQ ID NO: 1441 - protein, 5 aa, Artificial Sequence
  source: /note="Description of Artificial Sequence: sequence motif"
TYDIN

SEQ ID NO: 1442 - protein, 17 aa, Artificial Sequence
  source: /note="Description of Artificial Sequence: sequence motif"
WMNPTNGDTVYAQKFQD

SEQ ID NO: 1443 - protein, 10 aa, Artificial Sequence
  source: /note="Description of Artificial Sequence: sequence motif"
GRRDDWKNNY

SEQ ID NO: 1444 - protein, 119 aa, Artificial Sequence; identical to SEQ ID NO: 1436
  source: /note="Description of Artificial Sequence: IL-17RA binding protein"

SEQ ID NO: 1445 - protein, 5 aa, Artificial Sequence
  source: /note="Description of Artificial Sequence: sequence motif"
SYDIN

SEQ ID NO: 1446 - protein, 17 aa, Artificial Sequence
  source: /note="Description of Artificial Sequence: sequence motif"
WMNPKSGNTVYAQKFQD

SEQ ID NO: 1447 - protein, 10 aa, Artificial Sequence
  source: /note="Description of Artificial Sequence: sequence motif"
GRRDDWKNNY

SEQ ID NO: 1448 - protein, 119 aa, Artificial Sequence
  source: /note="Description of Artificial Sequence: IL-17RA binding protein"
QVQLVQSGAEVKKPGASVKVSCKASGYPFTSYDINWVRQATGQSLEWMGWMNPKSGNTVYAQKFQDRVTMTRNTSISTAYMELSSLRSEDTAVYFCARGRRDDWKNNYWGQGTLVTVSS

SEQ ID NO: 1449 - protein, 5 aa, Artificial Sequence
  source: /note="Description of Artificial Sequence: sequence motif"
SYDIN

SEQ ID NO: 1450 - protein, 17 aa, Artificial Sequence
  source: /note="Description of Artificial Sequence: sequence motif"
WMNPTNGDTVYAQKFQD

SEQ ID NO: 1451 - protein, 10 aa, Artificial Sequence
  source: /note="Description of Artificial Sequence: sequence motif"
GRRDDWKNNY

SEQ ID NO: 1452 - protein, 119 aa, Artificial Sequence
  source: /note="Description of Artificial Sequence: IL-17RA binding protein"
QVQLVQSGAEVKKPGASVKVSCKASGYPFTSYDINWVRQATGRSLEWMGWMNPTNGDTVYAQKFQDRVTMTRNTSISTAYMELSSLRSEDTAVYFCARGRRDDWKNNYWGQGTLVTVSS

SEQ ID NO: 1453 - protein, 5 aa, Artificial Sequence
  source: /note="Description of Artificial Sequence: sequence motif"
SYDIN

SEQ ID NO: 1454 - protein, 17 aa, Artificial Sequence
  source: /note="Description of Artificial Sequence: sequence motif"
WMNPTSGNTVYAQKFQG

SEQ ID NO: 1455 - protein, 10 aa, Artificial Sequence
  source: /note="Description of Artificial Sequence: sequence motif"
GRRDDWKNNY

SEQ ID NO: 1456 - protein, 119 aa, Artificial Sequence
  source: /note="Description of Artificial Sequence: IL-17RA binding protein"
QVQLVQSGAEVKKPGASVKVSCKASGYPFTSYDINWVRQATGQSLEWMGWMNPTSGNTVYAQKFQGRVTMTRNTSISTAYMELSSLRSEDTAVYFCARGRRDDWKNNYWGQGTLVTVSS

SEQ ID NO: 1457 - protein, 5 aa, Artificial Sequence
  source: /note="Description of Artificial Sequence: sequence motif"
SYDIN

SEQ ID NO: 1458 - protein, 17 aa, Artificial Sequence
  source: /note="Description of Artificial Sequence: sequence motif"
WMNPTNGNTVYAQKFQD

SEQ ID NO: 1459 - protein, 10 aa, Artificial Sequence
  source: /note="Description of Artificial Sequence: sequence motif"
GRRDDWKNNY

SEQ ID NO: 1460 - protein, 119 aa, Artificial Sequence; identical to SEQ ID NO: 1288
  source: /note="Description of Artificial Sequence: IL-17RA binding protein"

SEQ ID NO: 1461 - protein, 5 aa, Artificial Sequence
  source: /note="Description of Artificial Sequence: sequence motif"
SYDIN

SEQ ID NO: 1462 - protein, 17 aa, Artificial Sequence
  source: /note="Description of Artificial Sequence: sequence motif"
WMNPTSGNTVYAQKFQD

SEQ ID NO: 1463 - protein, 10 aa, Artificial Sequence
  source: /note="Description of Artificial Sequence: sequence motif"
GRRDDWKNNY

SEQ ID NO: 1464 - protein, 119 aa, Artificial Sequence
  source: /note="Description of Artificial Sequence: IL-17RA binding protein"
QVQLVQSGAEVKKPGASVKVSCKASGYPFTSYDINWVRQATGQSLEWMGWMNPTSGNTVYAQKFQDRVTMTRNTSISTAYMELSSLRSEDTAVYFCARGRRDDWKNNYWGQGTLVTVSS

SEQ ID NO: 1465 - protein, 5 aa, Artificial Sequence
  source: /note="Description of Artificial Sequence: sequence motif"
SYDIN

SEQ ID NO: 1466 - protein, 17 aa, Artificial Sequence
  source: /note="Description of Artificial Sequence: sequence motif"
WMNPKNGNTVYAQKFQD

SEQ ID NO: 1467 - protein, 10 aa, Artificial Sequence
  source: /note="Description of Artificial Sequence: sequence motif"
GRRDDWKNNY

SEQ ID NO: 1468 - protein, 119 aa, Artificial Sequence; identical to SEQ ID NO: 1412
  source: /note="Description of Artificial Sequence: IL-17RA binding protein"

SEQ ID NO: 1469 - protein, 5 aa, Artificial Sequence
  source: /note="Description of Artificial Sequence: sequence motif"
TYDIN

SEQ ID NO: 1470 - protein, 17 aa, Artificial Sequence
  source: /note="Description of Artificial Sequence: sequence motif"
WMNPESGDTVYAQKFQD

SEQ ID NO: 1471 - protein, 10 aa, Artificial Sequence
  source: /note="Description of Artificial Sequence: sequence motif"
GRRDDWKNNY

SEQ ID NO: 1472 - protein, 119 aa, Artificial Sequence
  source: /note="Description of Artificial Sequence: IL-17RA binding protein"
QVQLVQSGAEVKKPGASVKVSCKASGYPFTTYDINWVRQATGRSLEWMGWMNPESGDTVYAQKFQDRVTMTRNTSISTAYMELSSLRSEDTAVYFCARGRRDDWKNNYWGQGTLVTVSS

SEQ ID NO: 1473 - protein, 5 aa, Artificial Sequence
  source: /note="Description of Artificial Sequence: sequence motif"
SYDIN

SEQ ID NO: 1474 - protein, 17 aa, Artificial Sequence
  source: /note="Description of Artificial Sequence: sequence motif"
WMNPNNGNTVYAQKFQD

SEQ ID NO: 1475 - protein, 10 aa, Artificial Sequence
  source: /note="Description of Artificial Sequence: sequence motif"
GRRDDWKNNY

SEQ ID NO: 1476 - protein, 119 aa, Artificial Sequence
  source: /note="Description of Artificial Sequence: IL-17RA binding protein"
QVQLVQSGAEVKKPGASVKVSCKASGYPFTSYDINWVRQATGRSLEWMGWMNPNNGNTVYAQKFQDRVTMTRNTSISTAYMELSSLRSEDTAVYFCARGRRDDWKNNYWGQGTLVTVSS

SEQ ID NO: 1477 - protein, 5 aa, Artificial Sequence
  source: /note="Description of Artificial Sequence: sequence motif"
SYDIN

SEQ ID NO: 1478 - protein, 17 aa, Artificial Sequence
  source: /note="Description of Artificial Sequence: sequence motif"
WMNPTNGNTVYAQKFQD

SEQ ID NO: 1479 - protein, 10 aa, Artificial Sequence
  source: /note="Description of Artificial Sequence: sequence motif"
GIRDDWKNNY

SEQ ID NO: 1480 - protein, 119 aa, Artificial Sequence
  source: /note="Description of Artificial Sequence: IL-17RA binding protein"
QVQLVQSGAEVKKPGASVKVSCKASGYPFTSYDINWVRQATGRSLEWMGWMNPTNGNTVYAQKFQDRVTMTRNTSISTAYMELSSLRSEDTAVYFCARGIRDDWKNNYWGQGTLVTVSS

SEQ ID NO: 1481 - protein, 5 aa, Artificial Sequence
  source: /note="Description of Artificial Sequence: sequence motif"
SYDIN

SEQ ID NO: 1482 - protein, 17 aa, Artificial Sequence
  source: /note="Description of Artificial Sequence: sequence motif"
WMNPESGDTVYAQKFQG

SEQ ID NO: 1483 - protein, 10 aa, Artificial Sequence
  source: /note="Description of Artificial Sequence: sequence motif"
GIRDDWKNNY

SEQ ID NO: 1484 - protein, 119 aa, Artificial Sequence
  source: /note="Description of Artificial Sequence: IL-17RA binding protein"
QVQLVQSGAEVKKPGASVKVSCKASGYPFTSYDINWVRQATGRSLEWMGWMNPESGDTVYAQKFQGRVTMTRNTSISTAYMELSSLRSEDTAVYFCARGIRDDWKNNYWGQGTLVTVSS

SEQ ID NO: 1485 - protein, 5 aa, Artificial Sequence
  source: /note="Description of Artificial Sequence: sequence motif"
SYDIN

SEQ ID NO: 1486 - protein, 17 aa, Artificial Sequence
  source: /note="Description of Artificial Sequence: sequence motif"
WMNPTNGNTVYAQKFQD

SEQ ID NO: 1487 - protein, 10 aa, Artificial Sequence
  source: /note="Description of Artificial Sequence: sequence motif"
GRRDDWKNNY

SEQ ID NO: 1488 - protein, 119 aa, Artificial Sequence; identical to SEQ ID NO: 1288
  source: /note="Description of Artificial Sequence: IL-17RA binding protein"

SEQ ID NO: 1489 - protein, 5 aa, Artificial Sequence
  source: /note="Description of Artificial Sequence: sequence motif"
SYDIN

SEQ ID NO: 1490 - protein, 17 aa, Artificial Sequence
  source: /note="Description of Artificial Sequence: sequence motif"
WMNPTNGNTVYAQKFQD

SEQ ID NO: 1491 - protein, 10 aa, Artificial Sequence
  source: /note="Description of Artificial Sequence: sequence motif"
GRRDDWKNNY

SEQ ID NO: 1492 - protein, 119 aa, Artificial Sequence; identical to SEQ ID NO: 1288
  source: /note="Description of Artificial Sequence: IL-17RA binding protein"

SEQ ID NO: 1493 - protein, 5 aa, Artificial Sequence
  source: /note="Description of Artificial Sequence: sequence motif"
SYDIN

SEQ ID NO: 1494 - protein, 17 aa, Artificial Sequence
  source: /note="Description of Artificial Sequence: sequence motif"
WMNPTNGNTVYAQKFQD

SEQ ID NO: 1495 - protein, 10 aa, Artificial Sequence
  source: /note="Description of Artificial Sequence: sequence motif"
GRRDDWKNNY

SEQ ID NO: 1496 - protein, 119 aa, Artificial Sequence; identical to SEQ ID NO: 1288
  source: /note="Description of Artificial Sequence: IL-17RA binding protein"

SEQ ID NO: 1497 - protein, 5 aa, Artificial Sequence
  source: /note="Description of Artificial Sequence: sequence motif"
SYDIN

SEQ ID NO: 1498 - protein, 17 aa, Artificial Sequence
  source: /note="Description of Artificial Sequence: sequence motif"
WMNPTNGNTVYAQKFQD

SEQ ID NO: 1499 - protein, 10 aa, Artificial Sequence
  source: /note="Description of Artificial Sequence: sequence motif"
GRRDDWKNNY

SEQ ID NO: 1500 - protein, 119 aa, Artificial Sequence; identical to SEQ ID NO: 1272
  source: /note="Description of Artificial Sequence: IL-17RA binding protein"

SEQ ID NO: 1501 - protein, 5 aa, Artificial Sequence
  source: /note="Description of Artificial Sequence: sequence motif"
SYDIN

SEQ ID NO: 1502 - protein, 17 aa, Artificial Sequence
  source: /note="Description of Artificial Sequence: sequence motif"
WMNPKNGNTVYAQKFQD

SEQ ID NO: 1503 - protein, 10 aa, Artificial Sequence
  source: /note="Description of Artificial Sequence: sequence motif"
GRRDDWKNNY

SEQ ID NO: 1504 - protein, 119 aa, Artificial Sequence
  source: /note="Description of Artificial Sequence: IL-17RA binding protein"
QVQLVQSGAEVKKPGASVKVSCKASGYPFTSYDINWVRQATGRSLEWMGWMNPKNGNTVYAQKFQDRVTMTRNTSISTAYMELSSLRSEDTAVYFCARGRRDDWKNNYWGQGTLVTVSS

SEQ ID NO: 1505 - protein, 5 aa, Artificial Sequence
  source: /note="Description of Artificial Sequence: sequence motif"
TYDIN

SEQ ID NO: 1506 - protein, 17 aa, Artificial Sequence
  source: /note="Description of Artificial Sequence: sequence motif"
WMNPKNGNTVYAQKFQD

SEQ ID NO: 1507 - protein, 10 aa, Artificial Sequence
  source: /note="Description of Artificial Sequence: sequence motif"
GRRDDWKNNY

SEQ ID NO: 1508 - protein, 119 aa, Artificial Sequence; identical to SEQ ID NO: 1332
  source: /note="Description of Artificial Sequence: IL-17RA binding protein"

SEQ ID NO: 1509 - protein, 5 aa, Artificial Sequence
  source: /note="Description of Artificial Sequence: sequence motif"
SYDIN

SEQ ID NO: 1510 - protein, 17 aa, Artificial Sequence
  source: /note="Description of Artificial Sequence: sequence motif"
WMNPKNGNTVYAQKFQD

SEQ ID NO: 1511 - protein, 10 aa, Artificial Sequence
  source: /note="Description of Artificial Sequence: sequence motif"
GRRDDWKNNY

SEQ ID NO: 1512 - protein, 119 aa, Artificial Sequence; identical to SEQ ID NO: 1504
  source: /note="Description of Artificial Sequence: IL-17RA binding protein"

SEQ ID NO: 1513 - protein, 5 aa, Artificial Sequence
  source: /note="Description of Artificial Sequence: sequence motif"
TYDIN

SEQ ID NO: 1514 - protein, 17 aa, Artificial Sequence
  source: /note="Description of Artificial Sequence: sequence motif"
WMNPTNGNTVYAQKFQD

SEQ ID NO: 1515 - protein, 10 aa, Artificial Sequence
  source: /note="Description of Artificial Sequence: sequence motif"
GRRDDWKNNY

SEQ ID NO: 1516 - protein, 119 aa, Artificial Sequence
  source: /note="Description of Artificial Sequence: IL-17RA binding protein"
QVQLVQSGAEVKKPGASVKVSCKASGYSFTTYDINWVRQATGRSLEWMGWMNPTNGNTVYAQKFQDRVTMTRNTSISTAYMELSSLRSEDTAVYFCARGRRDDWKNNYWGQGTLVTVSS

SEQ ID NO: 1517 - protein, 5 aa, Artificial Sequence
  source: /note="Description of Artificial Sequence: sequence motif"
SYDIN

SEQ ID NO: 1518 - protein, 17 aa, Artificial Sequence
  source: /note="Description of Artificial Sequence: sequence motif"
WMNPKNGNTVYAQKFQD

SEQ ID NO: 1519 - protein, 10 aa, Artificial Sequence
  source: /note="Description of Artificial Sequence: sequence motif"
GRRDDWKNNY

SEQ ID NO: 1520 - protein, 119 aa, Artificial Sequence
  source: /note="Description of Artificial Sequence: IL-17RA binding protein"
QVQLVQSGAEVKKPGASVKVSCKASGYAFTSYDINWVRQATGRSLEWMGWMNPKNGNTVYAQKFQDRVTMTRNTSISTAYMELSSLRSEDTAVYFCARGRRDDWKNNYWGQGTLVTVSS

SEQ ID NO: 1521 - protein, 5 aa, Artificial Sequence
  source: /note="Description of Artificial Sequence: sequence motif"
SYDIN

SEQ ID NO: 1522 - protein, 17 aa, Artificial Sequence
  source: /note="Description of Artificial Sequence: sequence motif"
WMNPTNGNTVYAQKFQD

SEQ ID NO: 1523 - protein, 10 aa, Artificial Sequence
  source: /note="Description of Artificial Sequence: sequence motif"
GRRDDWKNNY

SEQ ID NO: 1524 - protein, 119 aa, Artificial Sequence; identical to SEQ ID NO: 1288
  source: /note="Description of Artificial Sequence: IL-17RA binding protein"

SEQ ID NO: 1525 - protein, 5 aa, Artificial Sequence
  source: /note="Description of Artificial Sequence: sequence motif"
SYDIN

SEQ ID NO: 1526 - protein, 17 aa, Artificial Sequence
  source: /note="Description of Artificial Sequence: sequence motif"
WMNPTNGYTVYAQKFQD

SEQ ID NO: 1527 - protein, 10 aa, Artificial Sequence
  source: /note="Description of Artificial Sequence: sequence motif"
GRRDDWKNNY

SEQ ID NO: 1528 - protein, 119 aa, Artificial Sequence; identical to SEQ ID NO: 1308
  source: /note="Description of Artificial Sequence: IL-17RA binding protein"

SEQ ID NO: 1529 - protein, 5 aa, Artificial Sequence
  source: /note="Description of Artificial Sequence: sequence motif"
SYDIN

SEQ ID NO: 1530 - protein, 17 aa, Artificial Sequence
  source: /note="Description of Artificial Sequence: sequence motif"
WMNPTNGNTVYAQKFQD

SEQ ID NO: 1531 - protein, 10 aa, Artificial Sequence
  source: /note="Description of Artificial Sequence: sequence motif"
GRRDDWKNNY

SEQ ID NO: 1532 - protein, 119 aa, Artificial Sequence; identical to SEQ ID NO: 1272
  source: /note="Description of Artificial Sequence: IL-17RA binding protein"

SEQ ID NO: 1533 - protein, 5 aa, Artificial Sequence
  source: /note="Description of Artificial Sequence: sequence motif"
TYDIN

SEQ ID NO: 1534 - protein, 17 aa, Artificial Sequence
  source: /note="Description of Artificial Sequence: sequence motif"
WMNPKNGNTVYAQKFQD

SEQ ID NO: 1535 - protein, 10 aa, Artificial Sequence
  source: /note="Description of Artificial Sequence: sequence motif"
GRRDDWKNNY

SEQ ID NO: 1536 - protein, 119 aa, Artificial Sequence; identical to SEQ ID NO: 1332
  source: /note="Description of Artificial Sequence: IL-17RA binding protein"

SEQ ID NO: 1537 - protein, 5 aa, Artificial Sequence
  source: /note="Description of Artificial Sequence: sequence motif"
TYDIN

SEQ ID NO: 1538 - protein, 17 aa, Artificial Sequence
  source: /note="Description of Artificial Sequence: sequence motif"
WMNPGSGYTVYAQKFQD

SEQ ID NO: 1539 - protein, 10 aa, Artificial Sequence
  source: /note="Description of Artificial Sequence: sequence motif"
GIRDNWKNNY

SEQ ID NO: 1540 - protein, 119 aa, Artificial Sequence
  source: /note="Description of Artificial Sequence: IL-17RA binding protein"
QVQLVQSGAEVKKPGASVKVSCKASGYPFTTYDINWVRQATGRSLEWMGWMNPGSGYTVYAQKFQDRVTMTRNTSISTAYMELSSLRSEDTAVYFCARGIRDNWKNNYWGQGTLVTVSS

SEQ ID NO: 1541 - protein, 5 aa, Artificial Sequence
  source: /note="Description of Artificial Sequence: sequence motif"
SYDIN

SEQ ID NO: 1542 - protein, 17 aa, Artificial Sequence
  source: /note="Description of Artificial Sequence: sequence motif"
WMNPTNGNTVYAQKFQD

SEQ ID NO: 1543 - protein, 10 aa, Artificial Sequence
  source: /note="Description of Artificial Sequence: sequence motif"
GIRDNWKNNY

SEQ ID NO: 1544 - protein, 119 aa, Artificial Sequence
  source: /note="Description of Artificial Sequence: IL-17RA binding protein"
QVQLVQSGAEVKKPGASVKVSCKASGYPFTSYDINWVRQATGRSLEWMGWMNPTNGNTVYAQKFQDRVTMTRNTSISTAYMELSSLRSEDTAVYFCARGIRDNWKNNYWGQGTLVTVSS

SEQ ID NO: 1545 - protein, 5 aa, Artificial Sequence
  source: /note="Description of Artificial Sequence: sequence motif"
SYDIN

SEQ ID NO: 1546 - protein, 17 aa, Artificial Sequence
  source: /note="Description of Artificial Sequence: sequence motif"
WMNPTNGNTVYAQKFQD

SEQ ID NO: 1547 - protein, 10 aa, Artificial Sequence
  source: /note="Description of Artificial Sequence: sequence motif"
GIRDNWKNNY

SEQ ID NO: 1548 - protein, 119 aa, Artificial Sequence; identical to SEQ ID NO: 1544
  source: /note="Description of Artificial Sequence: IL-17RA binding protein"

SEQ ID NO: 1549 - protein, 5 aa, Artificial Sequence
  source: /note="Description of Artificial Sequence: sequence motif"
TYDIN

SEQ ID NO: 1550 - protein, 17 aa, Artificial Sequence
  source: /note="Description of Artificial Sequence: sequence motif"
WMNPESGDTVYAQKFQD

SEQ ID NO: 1551 - protein, 10 aa, Artificial Sequence
  source: /note="Description of Artificial Sequence: sequence motif"
GRRDDWKNNY

SEQ ID NO: 1552 - protein, 119 aa, Artificial Sequence; identical to SEQ ID NO: 1472
  source: /note="Description of Artificial Sequence: IL-17RA binding protein"

SEQ ID NO: 1553 - protein, 5 aa, Artificial Sequence
  source: /note="Description of Artificial Sequence: sequence motif"
SYDIN

SEQ ID NO: 1554 - protein, 17 aa, Artificial Sequence
  source: /note="Description of Artificial Sequence: sequence motif"
WMNPRNGYTVYAQKFQG

SEQ ID NO: 1555 - protein, 10 aa, Artificial Sequence
  source: /note="Description of Artificial Sequence: sequence motif"
GRRDDWKNNY

SEQ ID NO: 1556 - protein, 119 aa, Artificial Sequence
  source: /note="Description of Artificial Sequence: IL-17RA binding protein"
QVQLVQSGAEVKKPGASVKVSCKASGYAFTSYDINWVRQATGRSLEWMGWMNPRNGYTVYAQKFQGRVTMTRNTSISTAYMELSSLRSEDTAVYFCARGRRDDWKNNYWGQGTLVTVSS

SEQ ID NO: 1557 - protein, 5 aa, Artificial Sequence
  source: /note="Description of Artificial Sequence: sequence motif"
SYDIN

SEQ ID NO: 1558 - protein, 17 aa, Artificial Sequence
  source: /note="Description of Artificial Sequence: sequence motif"
WMNPTNGDTVYAQKFQG

SEQ ID NO: 1559 - protein, 10 aa, Artificial Sequence
  source: /note="Description of Artificial Sequence: sequence motif"
GRRDDWKNNY

SEQ ID NO: 1560 - protein, 119 aa, Artificial Sequence
  source: /note="Description of Artificial Sequence: IL-17RA binding protein"
QVQLVQSGAEVKKPGASVKVSCKASGYAFTSYDINWVRQATGRSLEWMGWMNPTNGDTVYAQKFQGRVTMTRNTSISTAYMELSSLRSEDTAVYFCARGRRDDWKNNYWGQGTLVTVSS

SEQ ID NO: 1561 - protein, 5 aa, Artificial Sequence
  source: /note="Description of Artificial Sequence: sequence motif"
SYDIN

SEQ ID NO: 1562 - protein, 17 aa, Artificial Sequence
  source: /note="Description of Artificial Sequence: sequence motif"
WMNPGSGDTVYAQKFQG

SEQ ID NO: 1563 - protein, 10 aa, Artificial Sequence
  source: /note="Description of Artificial Sequence: sequence motif"
GRRDDWKNNY

SEQ ID NO: 1564 - protein, 119 aa, Artificial Sequence; identical to SEQ ID NO: 1292
  source: /note="Description of Artificial Sequence: IL-17RA binding protein"

SEQ ID NO: 1565 - protein, 5 aa, Artificial Sequence
  source: /note="Description of Artificial Sequence: sequence motif"
TSDIN

SEQ ID NO: 1566 - protein, 17 aa, Artificial Sequence
  source: /note="Description of Artificial Sequence: sequence motif"
WMNPGSGDTVYAQKFQG

SEQ ID NO: 1567 - protein, 10 aa, Artificial Sequence
  source: /note="Description of Artificial Sequence: sequence motif"
GRRDDWKNNY

SEQ ID NO: 1568 - protein, 119 aa, Artificial Sequence
  source: /note="Description of Artificial Sequence: IL-17RA binding protein"
QVQLVBSGAEVKKPGASVKVSCKASGYPFTTSDINWVRQATGRSLEWMGWMNPGSGDTVYAQKFQGRVTMTRNTSISTAYMELSSLRSEDTAVYFCARGRRDDWKNNYWGQGTLVTVSS

SEQ ID NO: 1569 - protein, 5 aa, Artificial Sequence
  source: /note="Description of Artificial Sequence: sequence motif"
TYDIN

SEQ ID NO: 1570 - protein, 17 aa, Artificial Sequence
  source: /note="Description of Artificial Sequence: sequence motif"
WMNPESGDTVYAQKFQG

SEQ ID NO: 1571 - protein, 10 aa, Artificial Sequence
  source: /note="Description of Artificial Sequence: sequence motif"
GRRDNWKNNY

SEQ ID NO: 1572 - protein, 119 aa, Artificial Sequence
  source: /note="Description of Artificial Sequence: IL-17RA binding protein"
QVQLVQSGAEVKKPGASVKVSCKASGYPFTTYDINWVRQATGRSLEWMGWMNPESGDTVYAQKFQGRVTMTRNTSISTAYMELSSLRSEDTAVYFCARGRRDNWKNNYWGQGTLVTVSS

SEQ ID NO: 1573 - protein, 5 aa, Artificial Sequence
  source: /note="Description of Artificial Sequence: sequence motif"
SYDIN

SEQ ID NO: 1574 - protein, 17 aa, Artificial Sequence
  source: /note="Description of Artificial Sequence: sequence motif"
WMNPASGDTVYAQKFQG

SEQ ID NO: 1575 - protein, 10 aa, Artificial Sequence
  source: /note="Description of Artificial Sequence: sequence motif"
GRRDNWKNNY

SEQ ID NO: 1576 - protein, 119 aa, Artificial Sequence
  source: /note="Description of Artificial Sequence: IL-17RA binding protein"
QVQLVQSGAEVKKPGASVKVSCKASGYPFTSYDINWVRQATGRSLEWMGWMNPASGDTVYAQKFQGRVTMTRNTSISTAYMELSSLRSEDTAVYFCARGRRDNWKNNYWGQGTLVTVSS

SEQ ID NO: 1577 - protein, 5 aa, Artificial Sequence
  source: /note="Description of Artificial Sequence: sequence motif"
TYDIN

SEQ ID NO: 1578 - protein, 17 aa, Artificial Sequence
  source: /note="Description of Artificial Sequence: sequence motif"
WMNPRSGNTVYAQKFQG

SEQ ID NO: 1579 - protein, 10 aa, Artificial Sequence
  source: /note="Description of Artificial Sequence: sequence motif"
GIRDDWKNNY

SEQ ID NO: 1580 - protein, 119 aa, Artificial Sequence
  source: /note="Description of Artificial Sequence: IL-17RA binding protein"
QVQLVQSGAEVKKPGASVKVSCKASGYPFTTYDINWVRQATGQSLEWMGWMNPRSGNTVYAQKFQGRVTMTRNTSISTAYMELSSLRSEDTAVYFCARGIRDDWKNNYWGQGTLVTVSS

SEQ ID NO: 1581 - protein, 5 aa, Artificial Sequence
  source: /note="Description of Artificial Sequence: sequence motif"
SYDIN

SEQ ID NO: 1582 - protein, 17 aa, Artificial Sequence
  source: /note="Description of Artificial Sequence: sequence motif"
WMNPESGNTVYAQKFQG

SEQ ID NO: 1583 - protein, 10 aa, Artificial Sequence
  source: /note="Description of Artificial Sequence: sequence motif"
GIRDDWKNNY

SEQ ID NO: 1584 - protein, 119 aa, Artificial Sequence
  source: /note="Description of Artificial Sequence: IL-17RA binding protein"
QVQLVQSGAEVKKPGASVKVSCKASGYPFTSYDINWVRQATGRSLEWMGWMNPESGNTVYAQKFQGRVTMTRNTSISTAYMELSSLRSEDTAVYFCARGIRDDWKNNYWGQGTLVTVSS

SEQ ID NO: 1585 - protein, 5 aa, Artificial Sequence
  source: /note="Description of Artificial Sequence: sequence motif"
TYDIN

SEQ ID NO: 1586 - protein, 17 aa, Artificial Sequence
  source: /note="Description of Artificial Sequence: sequence motif"
WMNPTNGNTVYAQKFQG

SEQ ID NO: 1587 - protein, 10 aa, Artificial Sequence
  source: /note="Description of Artificial Sequence: sequence motif"
GRRDDWKNNY

SEQ ID NO: 1588 - protein, 119 aa, Artificial Sequence
  source: /note="Description of Artificial Sequence: IL-17RA binding protein"
QVQLVQSGAEVKKPGASVKVSCKASGYTFTTYDINWVRQATGQSLEWMGWMNPTNGNTVYAQKFQGRVTMTRNTSISTAYMELSSLRSEDTAVYFCARGRRDDWKNNYWGQGTLVTVSS

SEQ ID NO: 1589 - protein, 5 aa, Artificial Sequence
  source: /note="Description of Artificial Sequence: sequence motif"
SYDIN

SEQ ID NO: 1590 - protein, 17 aa, Artificial Sequence
  source: /note="Description of Artificial Sequence: sequence motif"
WMNPKNGNTVYAQKFQD

SEQ ID NO: 1591 - protein, 10 aa, Artificial Sequence
  source: /note="Description of Artificial Sequence: sequence motif"
GIRDDWKNNY

SEQ ID NO: 1592 - protein, 119 aa, Artificial Sequence
  source: /note="Description of Artificial Sequence: IL-17RA binding protein"
QVQLVQSGAEVKKPGASVKVSCKASGYTFTSYDINWVRQATGQSLEWMGWMNPKNGNTVYAQKFQDRVTMTRNTSISTAYMELSSLRSEDTAVYFCARGIRDDWKNNYWGQGTLVTVSS

SEQ ID NO: 1593 - protein, 5 aa, Artificial Sequence
  source: /note="Description of Artificial Sequence: sequence motif"
TYDIN

SEQ ID NO: 1594 - protein, 17 aa, Artificial Sequence
  source: /note="Description of Artificial Sequence: sequence motif"
WMNPTSGDTVYAQKFQG

SEQ ID NO: 1595 - protein, 10 aa, Artificial Sequence
  source: /note="Description of Artificial Sequence: sequence motif"
GRRDDWKNNY

SEQ ID NO: 1596 - protein, 119 aa, Artificial Sequence
  source: /note="Description of Artificial Sequence: IL-17RA binding protein"
QVQLVQSGAEVKKPGASVKVSCKASGYPFTTYDINWVRQATGQSLEWMGWMNPTSGDTVYAQKFQGRVTMTRNTSISTAYMELSSLRSEDTAVYFCARGRRDDWKNNYWGQGTLVTVSS

SEQ ID NO: 1597 - protein, 5 aa, Artificial Sequence
  source: /note="Description of Artificial Sequence: sequence motif"
SYDIN

SEQ ID NO: 1598 - protein, 17 aa, Artificial Sequence
  source: /note="Description of Artificial Sequence: sequence motif"
WMNPTSGDTVYAQKFQG

SEQ ID NO: 1599 - protein, 10 aa, Artificial Sequence
  source: /note="Description of Artificial Sequence: sequence motif"
GIRDNWKNNY

SEQ ID NO: 1600 - protein, 119 aa, Artificial Sequence
  source: /note="Description of Artificial Sequence: IL-17RA binding protein"
QVQLVQSGAEVKKPGASVKVSCKASGYPFTSYDINWVRQATGQSLEWMGWMNPTSGDTVYAQKFQGRVTMTRNTSISTAYMELSSLRSEDTAVYFCARGIRDNWKNNYWGQGTLVTVSS

SEQ ID NO: 1601 - protein, 5 aa, Artificial Sequence
  source: /note="Description of Artificial Sequence: sequence motif"
SYDIN

SEQ ID NO: 1602 - protein, 17 aa, Artificial Sequence
  source: /note="Description of Artificial Sequence: sequence motif"
WMNPTSGDTVYAQKFQD

SEQ ID NO: 1603 - protein, 10 aa, Artificial Sequence
  source: /note="Description of Artificial Sequence: sequence motif"
GRRDDWKNNY

SEQ ID NO: 1604 - protein, 119 aa, Artificial Sequence
  source: /note="Description of Artificial Sequence: IL-17RA binding protein"
QVQLVQSGAEVKKPGASVKVSCKASGYPFTSYDINWVRQATGRSLEWMGWMNPTSGDTVYAQKFQDRVTMTRNTSISTAYMELSSLRSEDTAVYFCARGRRDDWKNNYWGQGTLVTVSS

SEQ ID NO: 1605 - protein, 5 aa, Artificial Sequence
  source: /note="Description of Artificial Sequence: sequence motif"
SYDIN

SEQ ID NO: 1606 - protein, 17 aa, Artificial Sequence
  source: /note="Description of Artificial Sequence: sequence motif"
WMNPNNGNTVYAQKFQG

SEQ ID NO: 1607 - protein, 10 aa, Artificial Sequence
  source: /note="Description of Artificial Sequence: sequence motif"
GRRDDWKNNY

SEQ ID NO: 1608 - protein, 119 aa, Artificial Sequence
  source: /note="Description of Artificial Sequence: IL-17RA binding protein"
QVQLVQSGAEVKKPGASVKVSCKASGYPFTSYDINWVRQATGRSLEWMGWMNPNNGNTVYAQKFQGRVTMTRDTSISTAYMELSSLRSEDTAVYFCARGRRDDWKNNYWGQGTLVTVSS

SEQ ID NO: 1609 - protein, 5 aa, Artificial Sequence
  source: /note="Description of Artificial Sequence: sequence motif"
TYDIN

SEQ ID NO: 1610 - protein, 17 aa, Artificial Sequence
  source: /note="Description of Artificial Sequence: sequence motif"
WMNPNNGNTVYAQKFQD

SEQ ID NO: 1611 - protein, 10 aa, Artificial Sequence
  source: /note="Description of Artificial Sequence: sequence motif"
GRRDDWKNNY

SEQ ID NO: 1612 - protein, 119 aa, Artificial Sequence
  source: /note="Description of Artificial Sequence: IL-17RA binding protein"
QVQLVQSGAEVKKPGASVKVSCKASGYSFTTYDINWVRQATGQSLEWMGWMNPNNGNTVYAQKFQDRVTMTRNTSISTAYMELSSLRSEDTAVYFFARGRRDDWKNNYWGQGTLVTVSS

SEQ ID NO: 1613 - protein, 5 aa, Artificial Sequence
  source: /note="Description of Artificial Sequence: sequence motif"
TSDIN

SEQ ID NO: 1614 - protein, 17 aa, Artificial Sequence
  source: /note="Description of Artificial Sequence: sequence motif"
WMNPNSGYTVYAQKFQD

SEQ ID NO: 1615 - protein, 10 aa, Artificial Sequence
  source: /note="Description of Artificial Sequence: sequence motif"
GIRDNWKNNY

SEQ ID NO: 1616 - protein, 119 aa, Artificial Sequence
  source: /note="Description of Artificial Sequence: IL-17RA binding protein"
QVQLVQSGAEVKKPGASVKVSCKASGYPFTTSDINWVRQATGQSLEWMGWMNPNSGYTVYAQKFQDRVTMTRNTSISTAYMELSSLRSEDTAVYFCARGIRDNWKNNYWGQGTLVTVSS

SEQ ID NO: 1617 - protein, 5 aa, Artificial Sequence
  source: /note="Description of Artificial Sequence: sequence motif"
SYDIN

SEQ ID NO: 1618 - protein, 17 aa, Artificial Sequence
  source: /note="Description of Artificial Sequence: sequence motif"
WMNPKNGNTVYAQKFQG

SEQ ID NO: 1619 - protein, 10 aa, Artificial Sequence
  source: /note="Description of Artificial Sequence: sequence motif"
GRRDDWKNNY

SEQ ID NO: 1620 - protein, 119 aa, Artificial Sequence
  source: /note="Description of Artificial Sequence: IL-17RA binding protein"
QVQLVQSGAEVKKPGASVKVSCKASGYPFTSYDINWVRQATGRSLEWMGWMNPKNGNTVYAQKFQGRVTMTRNTSISTAYMELSSLRSEDTAVYFCARGRRDDWKNNYWGQGTLVTVSS

SEQ ID NO: 1621 - protein, 5 aa, Artificial Sequence
  source: /note="Description of Artificial Sequence: sequence motif"
SYDIN

SEQ ID NO: 1622 - protein, 17 aa, Artificial Sequence
  source: /note="Description of Artificial Sequence: sequence motif"
WMNPNSGDTVYAQKFQG

SEQ ID NO: 1623 - protein, 10 aa, Artificial Sequence
  source: /note="Description of Artificial Sequence: sequence motif"
GRRDDWKNNY

SEQ ID NO: 1624 - protein, 119 aa, Artificial Sequence; identical to SEQ ID NO: 1376
  source: /note="Description of Artificial Sequence: IL-17RA binding protein"

SEQ ID NO: 1625 - protein, 5 aa, Artificial Sequence
  source: /note="Description of Artificial Sequence: sequence motif"
SYDIN

SEQ ID NO: 1626 - protein, 17 aa, Artificial Sequence
  source: /note="Description of Artificial Sequence: sequence motif"
WMNPNSGDTVYAQKFQG

SEQ ID NO: 1627 - protein, 10 aa, Artificial Sequence
  source: /note="Description of Artificial Sequence: sequence motif"
GRRDDWKNNY

SEQ ID NO: 1628 - protein, 119 aa, Artificial Sequence; identical to SEQ ID NO: 1268
  source: /note="Description of Artificial Sequence: IL-17RA binding protein"

SEQ ID NO: 1629 - protein, 5 aa, Artificial Sequence
  source: /note="Description of Artificial Sequence: sequence motif"
TYDIN

SEQ ID NO: 1630 - protein, 17 aa, Artificial Sequence
  source: /note="Description of Artificial Sequence: sequence motif"
WMNPNSGDTVYAQKFQG

SEQ ID NO: 1631 - protein, 10 aa, Artificial Sequence
  source: /note="Description of Artificial Sequence: sequence motif"
GRRDDWKNNY

SEQ ID NO: 1632 - protein, 119 aa, Artificial Sequence
  source: /note="Description of Artificial Sequence: IL-17RA binding protein"
QVQLVQSGAEVKKPGASVKVSCKASGYPFTTYDINWVRQATGQSLEWMGWMNPNSGDTVYAQKFQGRVTMTRNTSISTAYMELSSLRSEDTAVYFCARGRRDDWKNNYWGQGTLVTVSS

SEQ ID NO: 1633 - protein, 5 aa, Artificial Sequence
  source: /note="Description of Artificial Sequence: sequence motif"
SYDIN

SEQ ID NO: 1634 - protein, 17 aa, Artificial Sequence
  source: /note="Description of Artificial Sequence: sequence motif"
WMNPNSGNTVYAQKFQG

SEQ ID NO: 1635 - protein, 10 aa, Artificial Sequence
  source: /note="Description of Artificial Sequence: sequence motif"
GRRDDWKNNY

SEQ ID NO: 1636 - protein, 119 aa, Artificial Sequence
  source: /note="Description of Artificial Sequence: IL-17RA binding protein"
QVQLVQSGAEVKRPGASVKVSCKASGYPFTSYDINWVRQATGQSLEWMGWMNPNSGNTVYAQKFQGRVTMTRNTSISTAYMELSSLRSEDTAVYFCARGRRDDWKNNYWGQGTLVTVSS

SEQ ID NO: 1637 - protein, 5 aa, Artificial Sequence
  source: /note="Description of Artificial Sequence: sequence motif"
SYDIN

SEQ ID NO: 1638 - protein, 17 aa, Artificial Sequence
  source: /note="Description of Artificial Sequence: sequence motif"
WMNPNSGNTVYAQKFQG

SEQ ID NO: 1639 - protein, 10 aa, Artificial Sequence
  source: /note="Description of Artificial Sequence: sequence motif"
GRRDDWKNNY

SEQ ID NO: 1640 - protein, 119 aa, Artificial Sequence
  source: /note="Description of Artificial Sequence: IL-17RA binding protein"
QVQLVQSGAEVKKPGASVKVSCKASGYPFTSYDINWVRQAAGQSLEWMGWMNPNSGNTVYAQKFQGRVTMTRNTSISTAYMELSSLRSEDTAVYFCARGRRDDWKNNYWGQGTLVTVSS

SEQ ID NO: 1641 - protein, 5 aa, Artificial Sequence
  source: /note="Description of Artificial Sequence: sequence motif"
SYDIN

SEQ ID NO: 1642 - protein, 17 aa, Artificial Sequence
  source: /note="Description of Artificial Sequence: sequence motif"
WMNPNSGDTVYAQKFQG

SEQ ID NO: 1643 - protein, 10 aa, Artificial Sequence
  source: /note="Description of Artificial Sequence: sequence motif"
GRRDDWKNNY

SEQ ID NO: 1644 - protein, 119 aa, Artificial Sequence
  source: /note="Description of Artificial Sequence: IL-17RA binding protein"
QVQLVQSGAEVKKPGASVKVSCKASGYTFTSYDINWVRQATGQSLEWMGWMNPNSGDTVYAQKFQGRVTMTRNTSISTAYMELSSLRSEDTAVYFCARGRRDDWKNNYWGQGTLVTVSS

SEQ ID NO: 1645 - protein, 5 aa, Artificial Sequence
  source: /note="Description of Artificial Sequence: sequence motif"
SYDIN

SEQ ID NO: 1646 - protein, 17 aa, Artificial Sequence
  source: /note="Description of Artificial Sequence: sequence motif"
WMNPKSGNTVYAQKFQG

SEQ ID NO: 1647 - protein, 10 aa, Artificial Sequence
  source: /note="Description of Artificial Sequence: sequence motif"
GRRDDWKNNY

SEQ ID NO: 1648 - protein, 119 aa, Artificial Sequence
  source: /note="Description of Artificial Sequence: IL-17RA binding protein"
QVQLVQSGAEVKKPGASVKVSCKASGYTFTSYDINWVRQATGQSLEWMGWMNPKSGNTVYAQKFQGRVTMTRNTSISTAYMELSSLRSEDTAVYFCARGRRDDWKNNYWGQGTLVTVSS

SEQ ID NO: 1649 - protein, 5 aa, Artificial Sequence
  source: /note="Description of Artificial Sequence: sequence motif"
SYDIN

SEQ ID NO: 1650 - protein, 17 aa, Artificial Sequence
  source: /note="Description of Artificial Sequence: sequence motif"
WMNPDSGYTVYAQKFQD

SEQ ID NO: 1651 - protein, 10 aa, Artificial Sequence
  source: /note="Description of Artificial Sequence: sequence motif"
GIRDDWKNNY

SEQ ID NO: 1652 - protein, 119 aa, Artificial Sequence
  source: /note="Description of Artificial Sequence: IL-17RA binding protein"
QVQLVQSGAEVKKPGASVKVSCKASGYTFTSYDINWVRQATGQSLEWMGWMNPDSGYTVYAQKFQDRVTMTRNTSISTAYMELSSLRSEDTAVYFCARGIRDDWKNNYWGQGTLVTVSS

SEQ ID NO: 1653 - protein, 5 aa, Artificial Sequence
  source: /note="Description of Artificial Sequence: sequence motif"
SYDIN

SEQ ID NO: 1654 - protein, 17 aa, Artificial Sequence
  source: /note="Description of Artificial Sequence: sequence motif"
WMNPDSGYTVYAQKFQD

SEQ ID NO: 1655 - protein, 10 aa, Artificial Sequence
  source: /note="Description of Artificial Sequence: sequence motif"
GRRDDWKNNY

SEQ ID NO: 1656 - protein, 119 aa, Artificial Sequence
  source: /note="Description of Artificial Sequence: IL-17RA binding protein"
QVQLVQSGAEVKKPGASVKVSCKASGYTFTSYDINWVRQATGQSLEWMGWMNPDSGYTVYAQKFQDRVTMTRNTSISTAYMELSSLRSEDTAVYFCARGRRDDWKNNYWGQGTLVTVSS

SEQ ID NO: 1657 - protein, 5 aa, Artificial Sequence
  source: /note="Description of Artificial Sequence: sequence motif"
SYDIN

SEQ ID NO: 1658 - protein, 17 aa, Artificial Sequence
  source: /note="Description of Artificial Sequence: sequence motif"
WMNPSSGYTVYAQKFQD

SEQ ID NO: 1659 - protein, 10 aa, Artificial Sequence
  source: /note="Description of Artificial Sequence: sequence motif"
GRRDDWKNNY

SEQ ID NO: 1660 - protein, 119 aa, Artificial Sequence
  source: /note="Description of Artificial Sequence: IL-17RA binding protein"
QVQLVQSGAEVKKPGASVKVSCKASGYTFTSYDINWVRQATGQSLEWMGWMNPSSGYTVYAQKFQDRVTMTRNTSISTAYMELSSLRSEDTAVYFCARGRRDDWKNNYWGQGTLVTVSS

SEQ ID NO: 1661 - protein, 5 aa, Artificial Sequence
  source: /note="Description of Artificial Sequence: sequence motif"
SYDIN

SEQ ID NO: 1662 - protein, 17 aa, Artificial Sequence
  source: /note="Description of Artificial Sequence: sequence motif"
WMNPNNGNTVYAQKFQG

SEQ ID NO: 1663 - protein, 10 aa, Artificial Sequence
  source: /note="Description of Artificial Sequence: sequence motif"
GRRDDWKNNY

SEQ ID NO: 1664 - protein, 119 aa, Artificial Sequence
  source: /note="Description of Artificial Sequence: IL-17RA binding protein"
QVQLVQSGAEVKKPGASVKVSCKASGYTFTSYDINWVRQATGQSLEWMGWMNPNNGNTVYAQKFQGRVTMTRNTSISTAYMELSSLTSEDTAVYFCARGRRDDWKNNYWGQGTLVTVSS

SEQ ID NO: 1665 - protein, 5 aa, Artificial Sequence
  source: /note="Description of Artificial Sequence: sequence motif"
SYDIN

SEQ ID NO: 1666 - protein, 17 aa, Artificial Sequence
  source: /note="Description of Artificial Sequence: sequence motif"
WMNPKSGDTVYAQKFQG

SEQ ID NO: 1667 - protein, 10 aa, Artificial Sequence
  source: /note="Description of Artificial Sequence: sequence motif"
GIRDDWKNNY

SEQ ID NO: 1668 - protein, 119 aa, Artificial Sequence
  source: /note="Description of Artificial Sequence: IL-17RA binding protein"
QVQLVQSGAEVKKPGASVKVSCKASGYTFTSYDINWVRQATGQSLEWMGWMNPKSGDTVYAQKFQGRVTMTRNTSISTAYMELSSLRSEDTAVYFCARGIRDDWKNNYWGQGTLVTVSS

SEQ ID NO: 1669 - protein, 5 aa, Artificial Sequence
  source: /note="Description of Artificial Sequence: sequence motif"
SYDIN

SEQ ID NO: 1670 - protein, 17 aa, Artificial Sequence
  source: /note="Description of Artificial Sequence: sequence motif"
WMNPKSGDTVYAQKFQG

SEQ ID NO: 1671 - protein, 10 aa, Artificial Sequence
  source: /note="Description of Artificial Sequence: sequence motif"
GIRDDWKNNY

SEQ ID NO: 1672 - protein, 119 aa, Artificial Sequence
  source: /note="Description of Artificial Sequence: IL-17RA binding protein"
QVQLVQSGAEVKKPGASVKVSCKASGYTFTSYDINWVRQATGQSLEWMGWMNPKSGDTVYAQKFQGRVTMTRNTSISTAYMELSNLRSEDTAVYYCARGIRDDWKNNYWGQGTLVTVSS

SEQ ID NO: 1673 - protein, 5 aa, Artificial Sequence
  source: /note="Description of Artificial Sequence: sequence motif"
SYDIN

SEQ ID NO: 1674 - protein, 17 aa, Artificial Sequence
  source: /note="Description of Artificial Sequence: sequence motif"
WMNPKSGDTVYAQKFQG

SEQ ID NO: 1675 - protein, 10 aa, Artificial Sequence
  source: /note="Description of Artificial Sequence: sequence motif"
GRRDDWKNNY

SEQ ID NO: 1676 - protein, 119 aa, Artificial Sequence
  source: /note="Description of Artificial Sequence: IL-17RA binding protein"
QVQLVQSGAEVKKPGASVKVSCKASGYTFTSYDINWVRQATGQSLEWMGWMNPKSGDTVYAQKFQGRVTMTRNTSISTAYMELSSLTSEDTAVYFCARGRRDDWKNNYWGQGTLVTVSS

SEQ ID NO: 1677 - protein, 5 aa, Artificial Sequence
  source: /note="Description of Artificial Sequence: sequence motif"
SYDIN

SEQ ID NO: 1678 - protein, 17 aa, Artificial Sequence
  source: /note="Description of Artificial Sequence: sequence motif"
WMNPNSGDTVYAQKFQG

SEQ ID NO: 1679 - protein, 10 aa, Artificial Sequence
  source: /note="Description of Artificial Sequence: sequence motif"
GRRDDWKNNY

SEQ ID NO: 1680 - protein, 119 aa, Artificial Sequence
  source: /note="Description of Artificial Sequence: IL-17RA binding protein"
QVQLVQSGAEVKKPGASVKVSCKASGYTFTSYDINWVRQATGQSLEWMGWMNPNSGDTVYAQKFQGRVTMTRNTSISTAYMELSSLTSEDTAVYYCARGRRDDWKNNYWGQGTLVTVSS

SEQ ID NO: 1681 - protein, 5 aa, Artificial Sequence
  source: /note="Description of Artificial Sequence: sequence motif"
SYDIN

SEQ ID NO: 1682 - protein, 17 aa, Artificial Sequence
  source: /note="Description of Artificial Sequence: sequence motif"
WMNPKSGDTVYAQKFQG

SEQ ID NO: 1683 - protein, 10 aa, Artificial Sequence
  source: /note="Description of Artificial Sequence: sequence motif"
GRRDDWKNNY

SEQ ID NO: 1684 - protein, 119 aa, Artificial Sequence
  source: /note="Description of Artificial Sequence: IL-17RA binding protein"
QVQLVQSGAEVKKPGASVKVSCKASGYTFTSYDINWVRQATGQSLEWMGWMNPKSGDTVYAQKFQGRVAMTRNTSISTAYMELSSLRSEDTAVYFCARGRRDDWKNNYWGQGTLVTVSS

SEQ ID NO: 1685 - protein, 5 aa, Artificial Sequence
  source: /note="Description of Artificial Sequence: sequence motif"
SFDIN

SEQ ID NO: 1686 - protein, 17 aa, Artificial Sequence
  source: /note="Description of Artificial Sequence: sequence motif"
WMNPNSGDTVYAQKFQG

SEQ ID NO: 1687 - protein, 10 aa, Artificial Sequence
  source: /note="Description of Artificial Sequence: sequence motif"
GRRDDWKNNY

SEQ ID NO: 1688 - protein, 119 aa, Artificial Sequence
  source: /note="Description of Artificial Sequence: IL-17RA binding protein"
QVQLVQSGAEVKKPGASVKVSCKASGYTFTSFDINWVRQATGQSLEWMGWMNPNSGDTVYAQKFQGRVTMTRNTSISTAYMELTSLRSEDTAVYFCARGRRDDWKNNYWGQGTLVTVSS

SEQ ID NO: 1689 - protein, 5 aa, Artificial Sequence
  source: /note="Description of Artificial Sequence: sequence motif"
SYDIN

SEQ ID NO: 1690 - protein, 17 aa, Artificial Sequence
  source: /note="Description of Artificial Sequence: sequence motif"
WMNPNSGYTVYAQKFQD

SEQ ID NO: 1691 - protein, 10 aa, Artificial Sequence
  source: /note="Description of Artificial Sequence: sequence motif"
GRRDDWKNNY

SEQ ID NO: 1692 - protein, 119 aa, Artificial Sequence
  source: /note="Description of Artificial Sequence: IL-17RA binding protein"
QVQLVQSGAEVKKPGASVKVSCKASGYAFTSYDINWVRQATGQSLEWMGWMNPNSGYTVYAQKFQDRVTMTRNISISTAYMELSSLRSEDTAVYFCARGRRDDWKNNYWGQGTLVTVSS

SEQ ID NO: 1693 - protein, 5 aa, Artificial Sequence
  source: /note="Description of Artificial Sequence: sequence motif"
SYDIN

SEQ ID NO: 1694 - protein, 17 aa, Artificial Sequence
  source: /note="Description of Artificial Sequence: sequence motif"
WMNPKSGYTVYAQKFQD

SEQ ID NO: 1695 - protein, 10 aa, Artificial Sequence
  source: /note="Description of Artificial Sequence: sequence motif"
GRRDDWKNNY

SEQ ID NO: 1696 - protein, 119 aa, Artificial Sequence
  source: /note="Description of Artificial Sequence: IL-17RA binding protein"
QVQLVQSGAEVKKPGASVKVSCKASGYTFTSYDINWVRQATGQSLEWMGWMNPKSGYTVYAQKFQDRVTMTRNISISTAYMELSSLRSEDTAVYFCARGRRDDWKNNYWGQGTLVTVSS

SEQ ID NO: 1697 - protein, 5 aa, Artificial Sequence
  source: /note="Description of Artificial Sequence: sequence motif"
SYDIN

SEQ ID NO: 1698 - protein, 17 aa, Artificial Sequence
  source: /note="Description of Artificial Sequence: sequence motif"
WMNPNSGYTVYAQKFQD

SEQ ID NO: 1699 - protein, 10 aa, Artificial Sequence
  source: /note="Description of Artificial Sequence: sequence motif"
GRRDDWKNNY

SEQ ID NO: 1700 - protein, 119 aa, Artificial Sequence
  source: /note="Description of Artificial Sequence: IL-17RA binding protein"
QVQLVQSGAEVKKPGASVKVSCKASGYTFTSYDINWVRQATGQSLEWMGWMNPNSGYTVYAQKFQDRVTMTRNISISTAYMELSSLRSEDTAVYFCARGRRDDWKNNYWGQGTLVTVSS

SEQ ID NO: 1701 - protein, 5 aa, Artificial Sequence
  source: /note="Description of Artificial Sequence: sequence motif"
SYDIN

SEQ ID NO: 1702 - protein, 17 aa, Artificial Sequence
  source: /note="Description of Artificial Sequence: sequence motif"
WMNPSSGYTVYAQKFQD

SEQ ID NO: 1703 - protein, 10 aa, Artificial Sequence
  source: /note="Description of Artificial Sequence: sequence motif"
GRRGDWKNNY

SEQ ID NO: 1704 - protein, 119 aa, Artificial Sequence
  source: /note="Description of Artificial Sequence: IL-17RA binding protein"
QVQLVQSGAEVKKPGASVKVSCKASGYTFTSYDINWVRQATGQSLEWMGWMNPSSGYTVYAQKFQDRVTMTRNISISTAYMELSSLRSEDTAIYFCARGRRGDWKNNYWGQGTLVTVSS

SEQ ID NO: 1705 - protein, 5 aa, Artificial Sequence
  source: /note="Description of Artificial Sequence: sequence motif"
SYDIN

SEQ ID NO: 1706 - protein, 17 aa, Artificial Sequence
  source: /note="Description of Artificial Sequence: sequence motif"
WMNPNNGNTVYAQQFQG

SEQ ID NO: 1707 - protein, 10 aa, Artificial Sequence
  source: /note="Description of Artificial Sequence: sequence motif"
GRRDDWKNNY

SEQ ID NO: 1708 - protein, 119 aa, Artificial Sequence
  source: /note="Description of Artificial Sequence: IL-17RA binding protein"
QVQLVQSGAEVKKPGASVKVSCKASGYSFTSYDINWVRQATGQSLEWMGWMNPNNGNTVYAQQFQGRVTMTRNTSISTAYMELSSLTSEDTAVYYCARGRRDDWKNNYWGQGTLVTVSS

SEQ ID NO: 1709 - protein, 5 aa, Artificial Sequence
  source: /note="Description of Artificial Sequence: sequence motif"
SYDIN

SEQ ID NO: 1710 - protein, 17 aa, Artificial Sequence
  source: /note="Description of Artificial Sequence: sequence motif"
WMNPNNGNAVYAQKFQG

SEQ ID NO: 1711 - protein, 10 aa, Artificial Sequence
  source: /note="Description of Artificial Sequence: sequence motif"
GRRDDWKNNY

SEQ ID NO: 1712 - protein, 119 aa, Artificial Sequence
  source: /note="Description of Artificial Sequence: IL-17RA binding protein"
QVQLVQSGAEVKKPGASVKVSCKASGYTFTSYDINWVRQATGQSLEWMGWMNPNNGNAVYAQKFQGRVTMTRNTSISTAYMELRSLTSEDTAVYYCARGRRDDWKNNYWGQGTLVTVSS

SEQ ID NO: 1713 - protein, 5 aa, Artificial Sequence
  source: /note="Description of Artificial Sequence: sequence motif"
SYDIN

SEQ ID NO: 1714 - protein, 17 aa, Artificial Sequence
  source: /note="Description of Artificial Sequence: sequence motif"
WMNPNNGNTVYAQKFQG

SEQ ID NO: 1715 - protein, 10 aa, Artificial Sequence
  source: /note="Description of Artificial Sequence: sequence motif"
GRRDNWKNNY

SEQ ID NO: 1716 - protein, 119 aa, Artificial Sequence
  source: /note="Description of Artificial Sequence: IL-17RA binding protein"
QVQLVQSGAEVKKPGASVKVSCKASGYTFTSYDINWVRQATGQSLEWMGWMNPNNGNTVYAQKFQGRVTMTRNTSISTAYMELISLTSEDTAVYYCARGRRDNWKNNYWGQGTLVTVSS

SEQ ID NO: 1717 - protein, 5 aa, Artificial Sequence
  source: /note="Description of Artificial Sequence: sequence motif"
SYDIN

SEQ ID NO: 1718 - protein, 17 aa, Artificial Sequence
  source: /note="Description of Artificial Sequence: sequence motif"
WMNPDSGYTVYAQKFQD

SEQ ID NO: 1719 - protein, 10 aa, Artificial Sequence
  source: /note="Description of Artificial Sequence: sequence motif"
GRRDDWKNNY

SEQ ID NO: 1720 - protein, 119 aa, Artificial Sequence
  source: /note="Description of Artificial Sequence: IL-17RA binding protein"
QVQLVQSGAEVKKPGASVRVSCKASGYTFTSYDINWVRQATGRSLEWMGWMNPDSGYTVYAQKFQDRVTMTRNTSISTAYMELSSLRSEDTAVYFCARGRRDDWKNNYWGQGTLVTVSS

SEQ ID NO: 1721 - protein, 5 aa, Artificial Sequence
  source: /note="Description of Artificial Sequence: sequence motif"
SYDIN

SEQ ID NO: 1722 - protein, 17 aa, Artificial Sequence
  source: /note="Description of Artificial Sequence: sequence motif"
WMNPNSGDTVYAQKFQG

SEQ ID NO: 1723 - protein, 10 aa, Artificial Sequence
  source: /note="Description of Artificial Sequence: sequence motif"
GRRDDWKNNY

SEQ ID NO: 1724 - protein, 119 aa, Artificial Sequence
  source: /note="Description of Artificial Sequence: IL-17RA binding protein"
QVQLVQSGAEVKKPGASVIVSCKASGYTFTSYDINWVRQATGRSLEWMGWMNPNSGDTVYAQKFQGRVTMTRNTSISTAYMELSSLRSEDTAVYFCARGRRDDWKNNYWGQGTLVTVSS

SEQ ID NO: 1725 - protein, 5 aa, Artificial Sequence
  source: /note="Description of Artificial Sequence: sequence motif"
SFDIN

SEQ ID NO: 1726 - protein, 17 aa, Artificial Sequence
  source: /note="Description of Artificial Sequence: sequence motif"
WMNPNSGNTVYAQKFQD

SEQ ID NO: 1727 - protein, 10 aa, Artificial Sequence
  source: /note="Description of Artificial Sequence: sequence motif"
GIRDDWKNNY

SEQ ID NO: 1728 - protein, 119 aa, Artificial Sequence
  source: /note="Description of Artificial Sequence: IL-17RA binding protein"
QVQLVQSGAEVKKPGASVKVSCKASGYTFTSFDINWVRQATGQSLEWMGWMNPNSGNTVYAQKFQDRVTMTRNTSISTAYMELSNLRSEDTAVYYCARGIRDDWKNNYWGQGTLVTVSS

SEQ ID NO: 1729 - protein, 5 aa, Artificial Sequence
  source: /note="Description of Artificial Sequence: sequence motif"
SYDIN

SEQ ID NO: 1730 - protein, 17 aa, Artificial Sequence
  source: /note="Description of Artificial Sequence: sequence motif"
WMNPNSGNTVYAQKFQD

SEQ ID NO: 1731 - protein, 10 aa, Artificial Sequence
  source: /note="Description of Artificial Sequence: sequence motif"
GIRDDWKNNY

SEQ ID NO: 1732 - protein, 119 aa, Artificial Sequence
  source: /note="Description of Artificial Sequence: IL-17RA binding protein"
QVQLVQSGAEVKKPGASVKVSCKASGYTFTSYDINWVRQATGQSLEWMGWMNPNSGNTVYAQKFQDRVTMTRNTSISTAYMELSNLRSEDTAVYYCARGIRDDWKNNYWGQGTLVTVSS

SEQ ID NO: 1733 - protein, 5 aa, Artificial Sequence
  source: /note="Description of Artificial Sequence: sequence motif"
SYDIN

SEQ ID NO: 1734 - protein, 17 aa, Artificial Sequence
  source: /note="Description of Artificial Sequence: sequence motif"
WMNPTSGNTVYAQKFQD

SEQ ID NO: 1735 - protein, 10 aa, Artificial Sequence
  source: /note="Description of Artificial Sequence: sequence motif"
GIRDDWKNNY

SEQ ID NO: 1736 - protein, 119 aa, Artificial Sequence
  source: /note="Description of Artificial Sequence: IL-17RA binding protein"
QVQLVQSGAEVKKPGASVKVSCKASGYTFTSYDINWVRQATGQSLEWMGWMNPTSGNTVYAQKFQDRVTMTRNTSISTAYMELSNLRSEDTAVYYCARGIRDDWKNNYWGQGTLVTVSS

SEQ ID NO: 1737 - protein, 5 aa, Artificial Sequence
  source: /note="Description of Artificial Sequence: sequence motif"
SYDIN

SEQ ID NO: 1738 - protein, 17 aa, Artificial Sequence
  source: /note="Description of Artificial Sequence: sequence motif"
WMNPNSGNTVYAQKFQD

SEQ ID NO: 1739 - protein, 10 aa, Artificial Sequence
  source: /note="Description of Artificial Sequence: sequence motif"
GIRDDWKNNY

SEQ ID NO: 1740 - protein, 119 aa, Artificial Sequence
  source: /note="Description of Artificial Sequence: IL-17RA binding protein"
QVQLVQSGAEVKKPGASVKVSCKASGYTFTSYDINWVRQATGQSLEWMGWMNPNSGNTVYAQKFQDRVTMTRNISISTAYMELSNLRSEDTAVYYCARGIRDDWKNNYWGQGTLVTVSS

SEQ ID NO: 1741 - protein, 5 aa, Artificial Sequence
  source: /note="Description of Artificial Sequence: sequence motif"
SYDIN

SEQ ID NO: 1742 - protein, 17 aa, Artificial Sequence
  source: /note="Description of Artificial Sequence: sequence motif"
WMNPKSGNTVYAQKFQG

SEQ ID NO: 1743 - protein, 10 aa, Artificial Sequence
  source: /note="Description of Artificial Sequence: sequence motif"
GIRDNWKNNY

SEQ ID NO: 1744 - protein, 119 aa, Artificial Sequence
  source: /note="Description of Artificial Sequence: IL-17RA binding protein"
QVQLVQSGAEVKKPGASVKVSCKASGYTFTSYDINWVRQATGQSLEWMGWMNPKSGNTVYAQKFQGRVTMTRNTSLSTAYMELSSLRSEDTAVYFCARGIRDNWKNNYWGQGTLVTVSS

SEQ ID NO: 1745 - protein, 5 aa, Artificial Sequence
  source: /note="Description of Artificial Sequence: sequence motif"
SYDIN

SEQ ID NO: 1746 - protein, 17 aa, Artificial Sequence
  source: /note="Description of Artificial Sequence: sequence motif"
WMNPKSGNTVYAQKFQG

SEQ ID NO: 1747 - protein, 10 aa, Artificial Sequence
  source: /note="Description of Artificial Sequence: sequence motif"
GIRDNWKNNY

SEQ ID NO: 1748 - protein, 119 aa, Artificial Sequence
  source: /note="Description of Artificial Sequence: IL-17RA binding protein"
QVQLVQSGAEVKKPGASVKVSCKASGYTFTSYDINWVRQATGQSLEWMGWMNPKSGNTVYAQKFQGRVTMTRNTSLSTAYMELSSLRSEDTAVYFCARGIRDNWKNNYWGQGTTVTVSS

SEQ ID NO: 1749 - protein, 5 aa, Artificial Sequence
  source: /note="Description of Artificial Sequence: sequence motif"
SYDIN

SEQ ID NO: 1750 - protein, 17 aa, Artificial Sequence
  source: /note="Description of Artificial Sequence: sequence motif"
WMNPSSGYTVYAQKFQG

SEQ ID NO: 1751 - protein, 10 aa, Artificial Sequence
  source: /note="Description of Artificial Sequence: sequence motif"
GIRDDWKNNY

SEQ ID NO: 1752 - protein, 119 aa, Artificial Sequence
  source: /note="Description of Artificial Sequence: IL-17RA binding protein"
QVQLVQSGAEVKKPGASVKVSCKASGYTFTSYDINWVRQATGQSLEWMGWMNPSSGYTVYAQKFQGRVTMTRNTSLSTAYMELSSLRSEDTAVYYCARGIRDDWKNNYWGQGTLVTVSS

SEQ ID NO: 1753 - protein, 5 aa, Artificial Sequence
  source: /note="Description of Artificial Sequence: sequence motif"
SYDIN

SEQ ID NO: 1754 - protein, 17 aa, Artificial Sequence
  source: /note="Description of Artificial Sequence: sequence motif"
WMNPNSGYTVYAQKFQD

SEQ ID NO: 1755 - protein, 10 aa, Artificial Sequence
  source: /note="Description of Artificial Sequence: sequence motif"
GIRDDWKNNY

SEQ ID NO: 1756 - protein, 119 aa, Artificial Sequence
  source: /note="Description of Artificial Sequence: IL-17RA binding protein"
QVQLVQSGAEVKKPGASVKVSCKASGYTFTSYDINWVRQATGQSLEWMGWMNPNSGYTVYAQKFQDRVTMTRNTSISTAYMELRNLRSEDTAVYFCARGIRDDWKNNYWGQGTLVTVSS

SEQ ID NO: 1757 - protein, 5 aa, Artificial Sequence
  source: /note="Description of Artificial Sequence: sequence motif"
SYDIN

SEQ ID NO: 1758 - protein, 17 aa, Artificial Sequence
  source: /note="Description of Artificial Sequence: sequence motif"
WMNPESGYTVYAQKFQG

SEQ ID NO: 1759 - protein, 10 aa, Artificial Sequence
  source: /note="Description of Artificial Sequence: sequence motif"
GIRDDWKNNY

SEQ ID NO: 1760 - protein, 119 aa, Artificial Sequence
  source: /note="Description of Artificial Sequence: IL-17RA binding protein"
QVQLVQSGAEVKKPGASVKVSCKASGYPFTSYDINWVRQATGQSLEWMGWMNPESGYTVYAQKFQGRVAMTRNTSLTTAYMELSNLRSEDTAVYYCARGIRDDWKNNYWGQGTLVTVSS

SEQ ID NO: 1761 - protein, 5 aa, Artificial Sequence
  source: /note="Description of Artificial Sequence: sequence motif"
TYDIN

SEQ ID NO: 1762 - protein, 17 aa, Artificial Sequence
  source: /note="Description of Artificial Sequence: sequence motif"
WMNPKSGYTVYAQKFQG

SEQ ID NO: 1763 - protein, 10 aa, Artificial Sequence
  source: /note="Description of Artificial Sequence: sequence motif"
GIRDDWKNNY

SEQ ID NO: 1764 - protein, 119 aa, Artificial Sequence
  source: /note="Description of Artificial Sequence: IL-17RA binding protein"
QVQLVQSGAEVKKPGASVKVSCKASGYPFSTYDINWVRQATGQSLEWMGWMNPKSGYTVYAQKFQGRVAMTRNTSLSTAYMELSNLRSEDTAVYYCARGIRDDWKNNYWGQGTLVTVSS

SEQ ID NO: 1765 - protein, 5 aa, Artificial Sequence
  source: /note="Description of Artificial Sequence: sequence motif"
TYWMR

SEQ ID NO: 1766 - protein, 17 aa, Artificial Sequence
  source: /note="Description of Artificial Sequence: sequence motif"
NINQDGSEKYYVDSVKG

SEQ ID NO: 1767 - protein, 9 aa, Artificial Sequence
  source: /note="Description of Artificial Sequence: sequence motif"
GWESGWFEP

SEQ ID NO: 1768 - protein, 118 aa, Artificial Sequence
  source: /note="Description of Artificial Sequence: IL-17RA binding protein"
EVQLVESGGGLVQPGGSLRLSCAASGFPFSTYWMRWLRQAPGKGLEWVANINQDGSEKYYVDSVKGRFTISRDNAKSSLFLQMNSLRAEDTAVYYCARGWESGWFEPWGQGTLVTVSS

SEQ ID NO: 1769 - protein, 5 aa, Artificial Sequence
  source: /note="Description of Artificial Sequence: sequence motif"
TYWMR

SEQ ID NO: 1770 - protein, 17 aa, Artificial Sequence
  source: /note="Description of Artificial Sequence: sequence motif"
NINQDGSEKYYVDSVKG

SEQ ID NO: 1771 - protein, 9 aa, Artificial Sequence
  source: /note="Description of Artificial Sequence: sequence motif"
GWESGWFEP

SEQ ID NO: 1772 - protein, 118 aa, Artificial Sequence; identical to SEQ ID NO: 1768
  source: /note="Description of Artificial Sequence: IL-17RA binding protein"

SEQ ID NO: 1773 - protein, 5 aa, Artificial Sequence
  source: /note="Description of Artificial Sequence: sequence motif"
TYWMR

SEQ ID NO: 1774 - protein, 17 aa, Artificial Sequence
  source: /note="Description of Artificial Sequence: sequence motif"
NINQDGSEKYYVDSVKG

SEQ ID NO: 1775 - protein, 9 aa, Artificial Sequence
  source: /note="Description of Artificial Sequence: sequence motif"
GWESGWFEP

SEQ ID NO: 1776 - protein, 118 aa, Artificial Sequence
  source: /note="Description of Artificial Sequence: IL-17RA binding protein"
QVQLVESGGGLVQPGGSLRLSCAASGFPFSTYWMRWLRQAPGKGLEWVANINQDGSEKYYVDSVKGRFTISRDNAKSSLFLQMNSLRAEDTAVYYCARGWESGWFEPWGQGTLVTVSS

SEQ ID NO: 1777 - protein, 5 aa, Artificial Sequence
  source: /note="Description of Artificial Sequence: sequence motif"
TYWMR

SEQ ID NO: 1778 - protein, 17 aa, Artificial Sequence
  source: /note="Description of Artificial Sequence: sequence motif"
NINQDGSEKYYVDSVKG

SEQ ID NO: 1779 - protein, 9 aa, Artificial Sequence
  source: /note="Description of Artificial Sequence: sequence motif"
GWESGWFEP

SEQ ID NO: 1780 - protein, 118 aa, Artificial Sequence; identical to SEQ ID NO: 1768
  source: /note="Description of Artificial Sequence: IL-17RA binding protein"

SEQ ID NO: 1781 - protein, 5 aa, Artificial Sequence
  source: /note="Description of Artificial Sequence: sequence motif"
TYWMR

SEQ ID NO: 1782 - protein, 17 aa, Artificial Sequence
  source: /note="Description of Artificial Sequence: sequence motif"
NINQDGSEKYYVDSVKG

SEQ ID NO: 1783 - protein, 9 aa, Artificial Sequence
  source: /note="Description of Artificial Sequence: sequence motif"
GWESGWFEP

SEQ ID NO: 1784 - protein, 118 aa, Artificial Sequence
  source: /note="Description of Artificial Sequence: IL-17RA binding protein"
EVQLVESGGGLVQPGGSLRLSCAASGFSLSTYWMRWLRQAPGKGLEWVANINQDGSEKYYVDSVKGRFTISRDNAKNSLFLQMNSLRAEDTAVYYCARGWESGWFEPWGQGTLVTVSS

SEQ ID NO: 1785 - protein, 5 aa, Artificial Sequence
  source: /note="Description of Artificial Sequence: sequence motif"
TYWMR

SEQ ID NO: 1786 - protein, 17 aa, Artificial Sequence
  source: /note="Description of Artificial Sequence: sequence motif"
NIKQDGSEKYYVDSVKG

SEQ ID NO: 1787 - protein, 9 aa, Artificial Sequence
  source: /note="Description of Artificial Sequence: sequence motif"
GWESGWFEP

SEQ ID NO: 1788 - protein, 118 aa, Artificial Sequence
  source: /note="Description of Artificial Sequence: IL-17RA binding protein"
EVQLVESGGGLVQPGGSLRLSCAASGFSLSTYWMRWLRQAPGKGLEWVANIKQDGSEKYYVDSVKGRFTTSRDNAKNSLFLQMNSLRAEDTAVYYCARGWESGWFEPWGQGTLVTVSS

SEQ ID NO: 1789 - protein, 5 aa, Artificial Sequence
  source: /note="Description of Artificial Sequence: sequence motif"
TYWMR

SEQ ID NO: 1790 - protein, 17 aa, Artificial Sequence
  source: /note="Description of Artificial Sequence: sequence motif"
NMNHDGSEKYYVDSVKG

SEQ ID NO: 1791 - protein, 9 aa, Artificial Sequence
  source: /note="Description of Artificial Sequence: sequence motif"
GWESGWFEP

SEQ ID NO: 1792 - protein, 118 aa, Artificial Sequence
  source: /note="Description of Artificial Sequence: IL-17RA binding protein"
QVQLVESGGGLVQPGGSLRLSCAASGFPFSTYWMRWLRQAPGKGLEWVANMNHDGSEKYYVDSVKGRFTISRDNAKNSLFLQMNSLRAEDTAVYYCARGWESGWFEPWGQGTLVTVSS

SEQ ID NO: 1793 - protein, 5 aa, Artificial Sequence
  source: /note="Description of Artificial Sequence: sequence motif"
TYWMR

SEQ ID NO: 1794 - protein, 17 aa, Artificial Sequence
  source: /note="Description of Artificial Sequence: sequence motif"
NMNHDGSEKYYVDSVKG

SEQ ID NO: 1795 - protein, 9 aa, Artificial Sequence
  source: /note="Description of Artificial Sequence: sequence motif"
GWESGWFEP

SEQ ID NO: 1796 - protein, 118 aa, Artificial Sequence; identical to SEQ ID NO: 1792
  source: /note="Description of Artificial Sequence: IL-17RA binding protein"

SEQ ID NO: 1797 - protein, 5 aa, Artificial Sequence
  source: /note="Description of Artificial Sequence: sequence motif"
TYWMS

SEQ ID NO: 1798 - protein, 17 aa, Artificial Sequence
  source: /note="Description of Artificial Sequence: sequence motif"
NIKQDGSEKYYVDSVKG

SEQ ID NO: 1799 - protein, 9 aa, Artificial Sequence
  source: /note="Description of Artificial Sequence: sequence motif"
GWESGWFEP

SEQ ID NO: 1800 - protein, 118 aa, Artificial Sequence
  source: /note="Description of Artificial Sequence: IL-17RA binding protein"
QVQLVESGGGLVQPGGSLRLSCAASGFPFSTYWMSWVRQAPGKGLEWVANIKQDGSEKYYVDSVKGRFTISRDNAKNSLYLQMNSLRAEDTAVYYCARGWESGWFEPWGQGTLVTVSS

SEQ ID NO: 1801 - protein, 5 aa, Artificial Sequence
  source: /note="Description of Artificial Sequence: sequence motif"
TYWMT

SEQ ID NO: 1802 - protein, 17 aa, Artificial Sequence
  source: /note="Description of Artificial Sequence: sequence motif"
NMNQDGSEKYYVDSVKG

SEQ ID NO: 1803 - protein, 9 aa, Artificial Sequence
  source: /note="Description of Artificial Sequence: sequence motif"
GYSSGWFEP

SEQ ID NO: 1804 - protein, 118 aa, Artificial Sequence
  source: /note="Description of Artificial Sequence: IL-17RA binding protein"
EVQLVESGGGLVKPGGSLRLSCEASGFTFSTYWMTWIRQAPGKGLEWVANMNQDGSEKYYVDSVKGRFTISRDNARNSLFLQMNSLRAEDTAMYYCARGYSSGWFEPWGQGTLVTVSS

SEQ ID NO: 1805 - protein, 5 aa, Artificial Sequence
  source: /note="Description of Artificial Sequence: sequence motif"
TYWMT

SEQ ID NO: 1806 - protein, 17 aa, Artificial Sequence
  source: /note="Description of Artificial Sequence: sequence motif"
NMNQDGSEKYYVDSVKG

SEQ ID NO: 1807 - protein, 9 aa, Artificial Sequence
  source: /note="Description of Artificial Sequence: sequence motif"
GYSSGWFEP

SEQ ID NO: 1808 - protein, 118 aa, Artificial Sequence
  source: /note="Description of Artificial Sequence: IL-17RA binding protein"
QVQLVESGGGLVQPGGSLRLSCEASGFTFSTYWMTWIRQAPGKGLEWVANMNQDGSEKYYVDSVKGRFTISRDNARNSLFLQMNSLRAEDTAMYYCARGYSSGWFEPWGQGTLVTVSS

SEQ ID NO: 1809 - protein, 5 aa, Artificial Sequence
  source: /note="Description of Artificial Sequence: sequence motif"
TYWMT

SEQ ID NO: 1810 - protein, 17 aa, Artificial Sequence
  source: /note="Description of Artificial Sequence: sequence motif"
NINQDGSEKQYVDSVKG

SEQ ID NO: 1811 - protein, 9 aa, Artificial Sequence
  source: /note="Description of Artificial Sequence: sequence motif"
GYSSGWFEP

SEQ ID NO: 1812 - protein, 118 aa, Artificial Sequence
  source: /note="Description of Artificial Sequence: IL-17RA binding protein"
QVQLVESGGGLVHPGGSLRLSCAASGFTFSTYWMTWVRQAPGKGLEWVANINQDGSEKQYVDSVKGRFTISRDNAKNSLFLQMISLRAEDTAMYYCARGYSSGWFEPWGQGTLVTVSS

SEQ ID NO: 1813 - protein, 5 aa, Artificial Sequence
  source: /note="Description of Artificial Sequence: sequence motif"
TYWMT

SEQ ID NO: 1814 - protein, 17 aa, Artificial Sequence
  source: /note="Description of Artificial Sequence: sequence motif"
NINQDGSEKQYVDSVKG

SEQ ID NO: 1815 - protein, 9 aa, Artificial Sequence
  source: /note="Description of Artificial Sequence: sequence motif"
GYSSGWFEP

SEQ ID NO: 1816 - protein, 118 aa, Artificial Sequence
  source: /note="Description of Artificial Sequence: IL-17RA binding protein"
EVQLVESGGGLVHPGGSLRLSCTASGFTFSTYWMTWVRQAPGKGLEWVANINQDGSEKQYVDSVKGRFTISRDNAKNSLFLQMISLRAEDTAMYYCARGYSSGWFEPWGQGTLVTVSS

SEQ ID NO: 1817 - protein, 5 aa, Artificial Sequence
  source: /note="Description of Artificial Sequence: sequence motif"
TYWMT

SEQ ID NO: 1818 - protein, 17 aa, Artificial Sequence
  source: /note="Description of Artificial Sequence: sequence motif"
NINQDGSEKQYVDSVKG

SEQ ID NO: 1819 - protein, 9 aa, Artificial Sequence
  source: /note="Description of Artificial Sequence: sequence motif"
GYSSGWFEP

SEQ ID NO: 1820 - protein, 118 aa, Artificial Sequence
  source: /note="Description of Artificial Sequence: IL-17RA binding protein"
EVQLVESGGGLVHPGGSLRLSCAASGFTFSTYWMTWVRQAPGKGLEWVANINQDGSEKQYVDSVKGRFTISRDNAKNSLFLQMISLRAEDTAMYYCARGYSSGWFEPWGQGTLVTVYS

SEQ ID NO: 1821 - protein, 5 aa, Artificial Sequence
  source: /note="Description of Artificial Sequence: sequence motif"
TYWMT

SEQ ID NO: 1822 - protein, 17 aa, Artificial Sequence
  source: /note="Description of Artificial Sequence: sequence motif"
NINQDGSEKQYVDSVKG

SEQ ID NO: 1823 - protein, 9 aa, Artificial Sequence
  source: /note="Description of Artificial Sequence: sequence motif"
GYSSGWFDP

SEQ ID NO: 1824 - protein, 118 aa, Artificial Sequence
  source: /note="Description of Artificial Sequence: IL-17RA binding protein"
EVQLVESGGGLVQPGGSLRLSCAASGFTFSTYWMTWVRQAPGKGLDWVANINQDGSEKQYVDSVKGRFTISRDNAKNSLYLQMNSLRAEDTAMYYCARGYSSGWFDPWGQGTLVTVSS

SEQ ID NO: 1825 - protein, 5 aa, Artificial Sequence
  source: /note="Description of Artificial Sequence: sequence motif"
TYWMT

SEQ ID NO: 1826 - protein, 17 aa, Artificial Sequence
  source: /note="Description of Artificial Sequence: sequence motif"
NINQDGSEKQYVDSVKG

SEQ ID NO: 1827 - protein, 9 aa, Artificial Sequence
  source: /note="Description of Artificial Sequence: sequence motif"
GYSSGWFDP

SEQ ID NO: 1828 - protein, 118 aa, Artificial Sequence; identical to SEQ ID NO: 1824
  source: /note="Description of Artificial Sequence: IL-17RA binding protein"

SEQ ID NO: 1829 - protein, 5 aa, Artificial Sequence
  source: /note="Description of Artificial Sequence: sequence motif"
TYWMT

SEQ ID NO: 1830 - protein, 17 aa, Artificial Sequence
  source: /note="Description of Artificial Sequence: sequence motif"
NINQDGTEKYYVDSVKG

SEQ ID NO: 1831 - protein, 9 aa, Artificial Sequence
  source: /note="Description of Artificial Sequence: sequence motif"
GYSSGWFEP

SEQ ID NO: 1832 - protein, 118 aa, Artificial Sequence
  source: /note="Description of Artificial Sequence: IL-17RA binding protein"
EVQLVESGGGLVQPGGSLRLSCAASGFTFSTYWMTWVRQAPGKGLEWVANINQDGTEKYYVDSVKGRFTISRDNAENSLNLQMNSLRAEDTAVYYCARGYSSGWFEPWGQGTQVTVSS

SEQ ID NO: 1833 - protein, 5 aa, Artificial Sequence
  source: /note="Description of Artificial Sequence: sequence motif"
TYWMR

SEQ ID NO: 1834 - protein, 17 aa, Artificial Sequence
  source: /note="Description of Artificial Sequence: sequence motif"
NINHDGSEKYYVDSVKG

SEQ ID NO: 1835 - protein, 9 aa, Artificial Sequence
  source: /note="Description of Artificial Sequence: sequence motif"
GYSSGWFDP

SEQ ID NO: 1836 - protein, 118 aa, Artificial Sequence
  source: /note="Description of Artificial Sequence: IL-17RA binding protein"
EVQLVESGGGLVQPGGSLRLSCAASGFTFTTYWMRWLRQAPGKGLEWVANINHDGSEKYYVDSVKGRFTISRDNAKNSLYLQMNSLRAEDTAMYYCARGYSSGWFDPWGQGTLVTVSS

SEQ ID NO: 1837 - protein, 5 aa, Artificial Sequence
  source: /note="Description of Artificial Sequence: sequence motif"
TYWMS

SEQ ID NO: 1838 - protein, 17 aa, Artificial Sequence
  source: /note="Description of Artificial Sequence: sequence motif"
NINHDGSEKYYVDSVKG

SEQ ID NO: 1839 - protein, 9 aa, Artificial Sequence
  source: /note="Description of Artificial Sequence: sequence motif"
GYSSGWFDP

SEQ ID NO: 1840 - protein, 118 aa, Artificial Sequence
  source: /note="Description of Artificial Sequence: IL-17RA binding protein"
EVQLVESGGGLVQPGGSLRLSCAASGFTFTTYWMSWLRQAPGKGLEWVANINHDGSEKYYVDSVKGRFTISRDNAKNSLYLQMNSLRAEDTAMYYCARGYSSGWFDPWGQGTLVTVSS

SEQ ID NO: 1841 - protein, 5 aa, Artificial Sequence
  source: /note="Description of Artificial Sequence: sequence motif"
TYWMR

SEQ ID NO: 1842 - protein, 17 aa, Artificial Sequence
  source: /note="Description of Artificial Sequence: sequence motif"
NIKQDGSEKYYVDSVKG

SEQ ID NO: 1843 - protein, 9 aa, Artificial Sequence
  source: /note="Description of Artificial Sequence: sequence motif"
GWESGWFEP

SEQ ID NO: 1844 - protein, 118 aa, Artificial Sequence
  source: /note="Description of Artificial Sequence: IL-17RA binding protein"
QVQLVESGGGLVQPGGSLRLSCAASGFPFSTYWMRWLRQAPGKGLEWVANIKQDGSEKYYVDSVKGRFTISRDNAKNSLFLQMNSLRAEDTAVYYCARGWESGWFEPWGQGTLVTVSS

SEQ ID NO: 1845 - protein, 5 aa, Artificial Sequence
  source: /note="Description of Artificial Sequence: sequence motif"
TYWMR

SEQ ID NO: 1846 - protein, 17 aa, Artificial Sequence
  source: /note="Description of Artificial Sequence: sequence motif"
NIKQDGSEKYYVDSVKG

SEQ ID NO: 1847 - protein, 9 aa, Artificial Sequence
  source: /note="Description of Artificial Sequence: sequence motif"
GWESGWFEP

SEQ ID NO: 1848 - protein, 118 aa, Artificial Sequence; identical to SEQ ID NO: 1844
  source: /note="Description of Artificial Sequence: IL-17RA binding protein"

SEQ ID NO: 1849 - protein, 5 aa, Artificial Sequence
  source: /note="Description of Artificial Sequence: sequence motif"
TYWMY

SEQ ID NO: 1850 - protein, 17 aa, Artificial Sequence
  source: /note="Description of Artificial Sequence: sequence motif"
NIKQDGSERNYVDSVKG

SEQ ID NO: 1851 - protein, 9 aa, Artificial Sequence
  source: /note="Description of Artificial Sequence: sequence motif"
GYSSGWFDP

SEQ ID NO: 1852 - protein, 118 aa, Artificial Sequence
  source: /note="Description of Artificial Sequence: IL-17RA binding protein"
EVQLVESGGGLVQPGGSLRLSCEASGFTFSTYWMYWVRQAPGKGLEWVANIKQDGSERNYVDSVKGRFTISRDNAKNSLSLQMNSLRAEDTAVYYCARGYSSGWFDPWGQGTLVTVSS

SEQ ID NO: 1853 - protein, 5 aa, Artificial Sequence
  source: /note="Description of Artificial Sequence: sequence motif"
SYWMT

SEQ ID NO: 1854 - protein, 17 aa, Artificial Sequence
  source: /note="Description of Artificial Sequence: sequence motif"
NINHDGSEIQYVDSVRG

SEQ ID NO: 1855 - protein, 9 aa, Artificial Sequence
  source: /note="Description of Artificial Sequence: sequence motif"
GYSSGWFDP

SEQ ID NO: 1856 - protein, 118 aa, Artificial Sequence
  source: /note="Description of Artificial Sequence: IL-17RA binding protein"
EVQLVESGGGLVQPGGSLRLSCAASGFTFSSYWMTWIRQAPGKGLEWVANINHDGSEIQYVDSVRGRFTISRDNANNSLYLQMNSLRAEDTAVYYCARGYSSGWFDPWGQGTRVTVSS

SEQ ID NO: 1857 - protein, 5 aa, Artificial Sequence
  source: /note="Description of Artificial Sequence: sequence motif"
TYWMT

SEQ ID NO: 1858 - protein, 17 aa, Artificial Sequence
  source: /note="Description of Artificial Sequence: sequence motif"
NINHDGSEIQYVDSVRG

SEQ ID NO: 1859 - protein, 9 aa, Artificial Sequence
  source: /note="Description of Artificial Sequence: sequence motif"
GYSSGWFDP

SEQ ID NO: 1860 - protein, 118 aa, Artificial Sequence
  source: /note="Description of Artificial Sequence: IL-17RA binding protein"
QVQLVESGGGLVQPGGSLRLSCAASGFTFSTYWMTWIRQAPGKGLEWVANINHDGSEIQYVDSVRGRFTISRDNANNSLYLQMNSLRAEDTAVYYCARGYSSGWFDPWGQGTRVTVSS

SEQ ID NO: 1861 - protein, 5 aa, Artificial Sequence
  source: /note="Description of Artificial Sequence: sequence motif"
TYWMT

SEQ ID NO: 1862 - protein, 17 aa, Artificial Sequence
  source: /note="Description of Artificial Sequence: sequence motif"
NINQDGSEIQYVDSVKG

SEQ ID NO: 1863 - protein, 9 aa, Artificial Sequence
  source: /note="Description of Artificial Sequence: sequence motif"
GYSSGWFDP

SEQ ID NO: 1864 - protein, 118 aa, Artificial Sequence
  source: /note="Description of Artificial Sequence: IL-17RA binding protein"
EVQLVESGGGLVQPGGSLRLSCAASGFTFSTYWMTWVRQAPGKGLEWVANINQDGSEIQYVDSVKGRFTISRDNANNSLYLQMNSLRAEDTAVYYCARGYSSGWFDPWGQGTRVTVSS

SEQ ID NO: 1865 - protein, 5 aa, Artificial Sequence
  source: /note="Description of Artificial Sequence: sequence motif"
TYWMT

SEQ ID NO: 1866 - protein, 17 aa, Artificial Sequence
  source: /note="Description of Artificial Sequence: sequence motif"
NIKQDGSEKQYVDSVKG

SEQ ID NO: 1867 - protein, 9 aa, Artificial Sequence
  source: /note="Description of Artificial Sequence: sequence motif"
GYSSGWFEP

SEQ ID NO: 1868 - protein, 118 aa, Artificial Sequence
  source: /note="Description of Artificial Sequence: IL-17RA binding protein"
EVQLVESGGGLVQPGRSLRLSCAASGFTFSTYWMTWVRQAPGKGLEWVANIKQDGSEKQYVDSVKGRFTISRDNAKNSLYLQMNSLRAEDTAVYYCARGYSSGWFEPWGQGTLVTVSS

SEQ ID NO: 1869 - protein, 5 aa, Artificial Sequence
  source: /note="Description of Artificial Sequence: sequence motif"
TYWMS

SEQ ID NO: 1870 - protein, 17 aa, Artificial Sequence
  source: /note="Description of Artificial Sequence: sequence motif"
NMNQDGSEKYYVDSVKG

SEQ ID NO: 1871 - protein, 9 aa, Artificial Sequence
  source: /note="Description of Artificial Sequence: sequence motif"
GYSSGWFDP

SEQ ID NO: 1872 - protein, 118 aa, Artificial Sequence
  source: /note="Description of Artificial Sequence: IL-17RA binding protein"
QVQLVESGGGLVQPGGSLRLSCAASGFTFSTYWMSWLRQAPGKGLEWVANMNQDGSEKYYVDSVKGRFTISRDNAKNSLYLQMNSLRAEDTAVYYCARGYSSGWFDPWGQGTLVTVSS

SEQ ID NO: 1873 - protein, 5 aa, Artificial Sequence
  source: /note="Description of Artificial Sequence: sequence motif"
TYWMT

SEQ ID NO: 1874 - protein, 17 aa, Artificial Sequence
  source: /note="Description of Artificial Sequence: sequence motif"
NINHDGSEKYYVDSVKG

SEQ ID NO: 1875 - protein, 9 aa, Artificial Sequence
  source: /note="Description of Artificial Sequence: sequence motif"
GYSSGWFEP

SEQ ID NO: 1876 - protein, 118 aa, Artificial Sequence
  source: /note="Description of Artificial Sequence: IL-17RA binding protein"
EVQLVESGGGLVQPGGSLRLSCAASGFTFTTYWMTWVRQAPGKGLEWVANINHDGSEKYYVDSVKGRFTISRDNVKNSMYLQMNSLRAEDTAVYYCARGYSSGWFEPWGQGTLVTVSS

SEQ ID NO: 1877 - protein, 5 aa, Artificial Sequence
  source: /note="Description of Artificial Sequence: sequence motif"
TYWMS

SEQ ID NO: 1878 - protein, 17 aa, Artificial Sequence
  source: /note="Description of Artificial Sequence: sequence motif"
NIKEDGSEKQYVDSVKG

SEQ ID NO: 1879 - protein, 9 aa, Artificial Sequence
  source: /note="Description of Artificial Sequence: sequence motif"
AYSSGWFDP

SEQ ID NO: 1880 - protein, 118 aa, Artificial Sequence
  source: /note="Description of Artificial Sequence: IL-17RA binding protein"
EVQLVESGGGLVQPGGSLRLSCAASGFTFSTYWMSWVRQAPGKGVEWVANIKEDGSEKQYVDSVKGRFTISRDNAKNSVYLQMNSLRAEDTAVYYCARAYSSGWFDPWGQGTLVTVSS

SEQ ID NO: 1881 - protein, 5 aa, Artificial Sequence
  source: /note="Description of Artificial Sequence: sequence motif"
TYWMT

SEQ ID NO: 1882 - protein, 17 aa, Artificial Sequence
  source: /note="Description of Artificial Sequence: sequence motif"
NINHDGSEKYYVDSVKG

SEQ ID NO: 1883 - protein, 9 aa, Artificial Sequence
  source: /note="Description of Artificial Sequence: sequence motif"
GYSGGWFEP

SEQ ID NO: 1884 - protein, 118 aa, Artificial Sequence
  source: /note="Description of Artificial Sequence: IL-17RA binding protein"
EVQLVESGGGLVQPGGSLRLSCAASGFTFTTYWMTWVRQAPGKGLEWVANINHDGSEKYYVDSVKGRFTISRDNAKNSLYLQMNSLRAEDTAVYFCARGYSGGWFEPWGQGTLVTVSS

SEQ ID NO: 1885 - protein, 5 aa, Artificial Sequence
  source: /note="Description of Artificial Sequence: sequence motif"
TYWMT

SEQ ID NO: 1886 - protein, 17 aa, Artificial Sequence
  source: /note="Description of Artificial Sequence: sequence motif"
NINHDGSEKYYVDSVKG

SEQ ID NO: 1887 - protein, 9 aa, Artificial Sequence
  source: /note="Description of Artificial Sequence: sequence motif"
GYSGGWFEP

SEQ ID NO: 1888 - protein, 118 aa, Artificial Sequence
  source: /note="Description of Artificial Sequence: IL-17RA binding protein"
QVQLVESGGGLVQPGGSLRLSCAASGFTFTTYWMTWVRQAPGKGLEWVANINHDGSEKYYVDSVKGRFTISRDNAKNSLYLQMNSLRAEDTAVYFCARGYSGGWFEPWGQGTLVTVSS

SEQ ID NO: 1889 - protein, 5 aa, Artificial Sequence
  source: /note="Description of Artificial Sequence: sequence motif"
SYWMS

SEQ ID NO: 1890 - protein, 17 aa, Artificial Sequence
  source: /note="Description of Artificial Sequence: sequence motif"
NINHDGSEKYYVDSVKG

SEQ ID NO: 1891 - protein, 9 aa, Artificial Sequence
  source: /note="Description of Artificial Sequence: sequence motif"
GYSGGWFEP

SEQ ID NO: 1892 - protein, 118 aa, Artificial Sequence
  source: /note="Description of Artificial Sequence: IL-17RA binding protein"
QVQLVESGGGLVQPGGSLRLSCAASGFTFSSYWMSWVRQAPGKGLEWVANINHDGSEKYYVDSVKGRFTISRDNAKNSLYLQMNSLRAEDTAVYFCARGYSGGWFEPWGQGTLVTVSS

SEQ ID NO: 1893 - protein, 5 aa, Artificial Sequence
  source: /note="Description of Artificial Sequence: sequence motif"
SYWMS

SEQ ID NO: 1894 - protein, 17 aa, Artificial Sequence
  source: /note="Description of Artificial Sequence: sequence motif"
NINEDGSEKYYVDSVKG

SEQ ID NO: 1895 - protein, 9 aa, Artificial Sequence
  source: /note="Description of Artificial Sequence: sequence motif"
GYSSGWFDP

SEQ ID NO: 1896 - protein, 118 aa, Artificial Sequence
  source: /note="Description of Artificial Sequence: IL-17RA binding protein"
QVQLVESGGGLVQPGGSLRLSCAASGFTFSSYWMSWVRQAPGKGLEWVANINEDGSEKYYVDSVKGRFTISRDNAKNSVYLQMNSLRAEDTAVYYCARGYSSGWFDPWGQGTLVTVSS

SEQ ID NO: 1897 - protein, 5 aa, Artificial Sequence
  source: /note="Description of Artificial Sequence: sequence motif"
TYWMT

SEQ ID NO: 1898 - protein, 17 aa, Artificial Sequence
  source: /note="Description of Artificial Sequence: sequence motif"
NINEDGSEKYYVDSVKG

SEQ ID NO: 1899 - protein, 9 aa, Artificial Sequence
  source: /note="Description of Artificial Sequence: sequence motif"
GYSSGWFDP

SEQ ID NO: 1900 - protein, 118 aa, Artificial Sequence
  source: /note="Description of Artificial Sequence: IL-17RA binding protein"
QVQLVESGGGLVQPGGSLRLSCAASGFTFTTYWMTWVRQAPGKGLEWVANINEDGSEKYYVDSVKGRFTISRDNAMDSLYLQMNSLRAEDTAVYYCARGYSSGWFDPWGQGTPVTVSS

SEQ ID NO: 1901 - protein, 5 aa, Artificial Sequence
  source: /note="Description of Artificial Sequence: sequence motif"
TYWMT

SEQ ID NO: 1902 - protein, 17 aa, Artificial Sequence
  source: /note="Description of Artificial Sequence: sequence motif"
NIKQDGSEKYYVDSVKG

SEQ ID NO: 1903 - protein, 9 aa, Artificial Sequence
  source: /note="Description of Artificial Sequence: sequence motif"
GYSSGWFDP

SEQ ID NO: 1904 - protein, 118 aa, Artificial Sequence
  source: /note="Description of Artificial Sequence: IL-17RA binding protein"
EVQLVESGGGLVQPGGSLKLSCAASGFPFSTYWMTWVRQAPGKGLEWVANIKQDGSEKYYVDSVKGRFTISRDNAKDSLYLQMNSLRADDTAVYYCARGYSSGWFDPWGQGTLVTVSS

SEQ ID NO: 1905 - protein, 5 aa, Artificial Sequence
  source: /note="Description of Artificial Sequence: sequence motif"
TYWMT

SEQ ID NO: 1906 - protein, 17 aa, Artificial Sequence
  source: /note="Description of Artificial Sequence: sequence motif"
NINQDGSEKQYVDSVKG

SEQ ID NO: 1907 - protein, 9 aa, Artificial Sequence
  source: /note="Description of Artificial Sequence: sequence motif"
GYSSGWFEP

SEQ ID NO: 1908 - protein, 118 aa, Artificial Sequence; identical to SEQ ID NO: 1812
  source: /note="Description of Artificial Sequence: IL-17RA binding protein"

SEQ ID NO: 1909 - protein, 5 aa, Artificial Sequence
  source: /note="Description of Artificial Sequence: sequence motif"
TYWMR

SEQ ID NO: 1910 - protein, 17 aa, Artificial Sequence
  source: /note="Description of Artificial Sequence: sequence motif"
NINQDGSEKYYVDSVKG

SEQ ID NO: 1911 - protein, 9 aa, Artificial Sequence
  source: /note="Description of Artificial Sequence: sequence motif"
GWESGWFEP

SEQ ID NO: 1912 - protein, 118 aa, Artificial Sequence
  source: /note="Description of Artificial Sequence: IL-17RA binding protein"
EVQLVESGGGLVQPGGSLRLSCAASGFPFSTYWMRWLRQAPGKGLEWVANINQDGSEKYYVDSVKGRFTISRDNAMNSLFLQMNSLRAEDTAVYYCARGWESGWFEPWGQGTLVTVSS

SEQ ID NO: 1913 - protein, 5 aa, Artificial Sequence
  source: /note="Description of Artificial Sequence: sequence motif"
TYWMR

SEQ ID NO: 1914 - protein, 17 aa, Artificial Sequence
  source: /note="Description of Artificial Sequence: sequence motif"
NINQDGSEKYYVDSVKG

SEQ ID NO: 1915 - protein, 9 aa, Artificial Sequence
  source: /note="Description of Artificial Sequence: sequence motif"
GWESGWFEP

SEQ ID NO: 1916 - protein, 118 aa, Artificial Sequence; identical to SEQ ID NO: 1768
  source: /note="Description of Artificial Sequence: IL-17RA binding protein"

SEQ ID NO: 1917 - protein, 5 aa, Artificial Sequence
  source: /note="Description of Artificial Sequence: sequence motif"
TYWMS

SEQ ID NO: 1918 - protein, 17 aa, Artificial Sequence
  source: /note="Description of Artificial Sequence: sequence motif"
NIKQDGSEKYYVDSVKG

SEQ ID NO: 1919 - protein, 9 aa, Artificial Sequence
  source: /note="Description of Artificial Sequence: sequence motif"
GWESGWFEP

SEQ ID NO: 1920 - protein, 118 aa, Artificial Sequence
  source: /note="Description of Artificial Sequence: IL-17RA binding protein"
QVQLVESGGGLVQPGGSLRLSCAASGFPFSTYWMSWVRQAPGKGLEWVANIKQDGSEKYYVDSVKGRFTISRDNAKDSLYLQMNSLRAEDTAVYYCARGWESGWFEPWGQGTLVTVSS

SEQ ID NO: 1921 - protein, 5 aa, Artificial Sequence
  source: /note="Description of Artificial Sequence: sequence motif"
TYWMT

SEQ ID NO: 1922 - protein, 17 aa, Artificial Sequence
  source: /note="Description of Artificial Sequence: sequence motif"
NINQDGSEKQYVDSVKG

SEQ ID NO: 1923 - protein, 9 aa, Artificial Sequence
  source: /note="Description of Artificial Sequence: sequence motif"
GYSSGWFEP

SEQ ID NO: 1924 - protein, 118 aa, Artificial Sequence; identical to SEQ ID NO: 1812
  source: /note="Description of Artificial Sequence: IL-17RA binding protein"

SEQ ID NO: 1925 - protein, 5 aa, Artificial Sequence
  source: /note="Description of Artificial Sequence: sequence motif"
TYWMT

SEQ ID NO: 1926 - protein, 17 aa, Artificial Sequence
  source: /note="Description of Artificial Sequence: sequence motif"
NINQDGSEKQYVDSVKG

SEQ ID NO: 1927 - protein, 9 aa, Artificial Sequence
  source: /note="Description of Artificial Sequence: sequence motif"
GYSSGWFEP

SEQ ID NO: 1928 - protein, 118 aa, Artificial Sequence
  source: /note="Description of Artificial Sequence: IL-17RA binding protein"
EVQLVESGGGLVHPGGSLRLSCAASGFTFSTYWMTWVRQAPGKGLEWVANINQDGSEKQYVDSVKGRFTISRDNAKNSLFLQMISLRAEDTAMYYCARGYSSGWFEPWGQGTLVTVSS

SEQ ID NO: 1929 - protein, 5 aa, Artificial Sequence
  source: /note="Description of Artificial Sequence: sequence motif"
TYWMT

SEQ ID NO: 1930 - protein, 17 aa, Artificial Sequence
  source: /note="Description of Artificial Sequence: sequence motif"
NINHDGSEIQYVDSVRG

SEQ ID NO: 1931 - protein, 9 aa, Artificial Sequence
  source: /note="Description of Artificial Sequence: sequence motif"
GYSSGWFDP

SEQ ID NO: 1932 - protein, 118 aa, Artificial Sequence
  source: /note="Description of Artificial Sequence: IL-17RA binding protein"
EVQLVESGGGLVQPGGSLRLSCAASGFTFSTYWMTWIRQAPGKGLEWVANINHDGSEIQYVDSVRGRFTISRDNANNSLYLQMNSLRAEDTAVYYCARGYSSGWFDPWGQGTRVTVSS

SEQ ID NO: 1933 - protein, 5 aa, Artificial Sequence
  source: /note="Description of Artificial Sequence: sequence motif"
TYWMT

SEQ ID NO: 1934 - protein, 17 aa, Artificial Sequence
  source: /note="Description of Artificial Sequence: sequence motif"
NINHDGSEIQYVDSVRG

SEQ ID NO: 1935 - protein, 9 aa, Artificial Sequence
  source: /note="Description of Artificial Sequence: sequence motif"
GYSSGWFDP

SEQ ID NO: 1936 - protein, 118 aa, Artificial Sequence; identical to SEQ ID NO: 1860
  source: /note="Description of Artificial Sequence: IL-17RA binding protein"

SEQ ID NO: 1937 - protein, 5 aa, Artificial Sequence
  source: /note="Description of Artificial Sequence: sequence motif"
TYWMR

SEQ ID NO: 1938 - protein, 17 aa, Artificial Sequence
  source: /note="Description of Artificial Sequence: sequence motif"
NIKQDGSEKYYVDSVKG

SEQ ID NO: 1939 - protein, 9 aa, Artificial Sequence
  source: /note="Description of Artificial Sequence: sequence motif"
GWESGWFEP

SEQ ID NO: 1940 - protein, 118 aa, Artificial Sequence
  source: /note="Description of Artificial Sequence: IL-17RA binding protein"
EVQLVESGGGLVQPGGSLRLSCAASGFPFSTYWMRWLRQAPGKGLEWVANIKQDGSEKYYVDSVKGRFTISRDNAKNSLFLQMNSLRAEDTAVYYCARGWESGWFEPWGQGTLVTVSS

SEQ ID NO: 1941 - protein, 5 aa, Artificial Sequence
  source: /note="Description of Artificial Sequence: sequence motif"
TYWMR

SEQ ID NO: 1942 - protein, 17 aa, Artificial Sequence
  source: /note="Description of Artificial Sequence: sequence motif"
NINQDGSEKYYVDSVKG

SEQ ID NO: 1943 - protein, 9 aa, Artificial Sequence
  source: /note="Description of Artificial Sequence: sequence motif"
GWESGWFEP

SEQ ID NO: 1944 - protein, 118 aa, Artificial Sequence; identical to SEQ ID NO: 1768
  source: /note="Description of Artificial Sequence: IL-17RA binding protein"

SEQ ID NO: 1945 - protein, 5 aa, Artificial Sequence
  source: /note="Description of Artificial Sequence: sequence motif"
TYWMR

SEQ ID NO: 1946 - protein, 17 aa, Artificial Sequence
  source: /note="Description of Artificial Sequence: sequence motif"
NINQDGSEKYYVDSVKG

SEQ ID NO: 1947 - protein, 9 aa, Artificial Sequence
  source: /note="Description of Artificial Sequence: sequence motif"
GWESGWFEP

SEQ ID NO: 1948 - protein, 118 aa, Artificial Sequence
  source: /note="Description of Artificial Sequence: IL-17RA binding protein"
EVQLVESGGGLVQPGGSLRLSCAASGFPFSTYWMRWLRQAPGKGLEWVANINQDGSEKYYVDSVKGRFTISRDNAKSSLFLQMNSLRAEDTAVYYCARGWESGWFEPWGQGTLVNVSS

SEQ ID NO: 1949 - protein, 5 aa, Artificial Sequence
  source: /note="Description of Artificial Sequence: sequence motif"
TYWMR

SEQ ID NO: 1950 - protein, 17 aa, Artificial Sequence
  source: /note="Description of Artificial Sequence: sequence motif"
NINQDGSEKYYVDSVKG

SEQ ID NO: 1951 - protein, 9 aa, Artificial Sequence
  source: /note="Description of Artificial Sequence: sequence motif"
GWESGWFEP

SEQ ID NO: 1952 - protein, 118 aa, Artificial Sequence
  source: /note="Description of Artificial Sequence: IL-17RA binding protein"
EVQLVESGGGLVQPGGSLRLSCAASGFPFSTYWMRWLRQAPGKGLEWVANINQDGSEKYYVDSVKGRFTISRDNAMNSLFLQMNSLRAEDTAVYYCARGWESGWFEPWGQGTLVNVSS

SEQ ID NO: 1953 - protein, 5 aa, Artificial Sequence
  source: /note="Description of Artificial Sequence: sequence motif"
TYWMR

SEQ ID NO: 1954 - protein, 17 aa, Artificial Sequence
  source: /note="Description of Artificial Sequence: sequence motif"
NINQDGSEKYYVDSVKG

SEQ ID NO: 1955 - protein, 9 aa, Artificial Sequence
  source: /note="Description of Artificial Sequence: sequence motif"
GWESGWFEP

SEQ ID NO: 1956 - protein, 118 aa, Artificial Sequence; identical to SEQ ID NO: 1768
  source: /note="Description of Artificial Sequence: IL-17RA binding protein"

SEQ ID NO: 1957 - protein, 5 aa, Artificial Sequence
  source: /note="Description of Artificial Sequence: sequence motif"
TYWMR

SEQ ID NO: 1958 - protein, 17 aa, Artificial Sequence
  source: /note="Description of Artificial Sequence: sequence motif"
NINQDGSEKYYVDSVKG

SEQ ID NO: 1959 - protein, 9 aa, Artificial Sequence
  source: /note="Description of Artificial Sequence: sequence motif"
GWESGWFEP

SEQ ID NO: 1960 - protein, 118 aa, Artificial Sequence; identical to SEQ ID NO: 1768
  source: /note="Description of Artificial Sequence: IL-17RA binding protein"

SEQ ID NO: 1961 - protein, 5 aa, Artificial Sequence
  source: /note="Description of Artificial Sequence: sequence motif"
TYWMR

SEQ ID NO: 1962 - protein, 17 aa, Artificial Sequence
  source: /note="Description of Artificial Sequence: sequence motif"
NINQDGSEKYYVDSVKG

SEQ ID NO: 1963 - protein, 9 aa, Artificial Sequence
  source: /note="Description of Artificial Sequence: sequence motif"
GWESGWFEP

SEQ ID NO: 1964 - protein, 118 aa, Artificial Sequence; identical to SEQ ID NO: 1768
  source: /note="Description of Artificial Sequence: IL-17RA binding protein"

SEQ ID NO: 1965 - protein, 5 aa, Artificial Sequence
  source: /note="Description of Artificial Sequence: sequence motif"
TYWMR

SEQ ID NO: 1966 - protein, 17 aa, Artificial Sequence
  source: /note="Description of Artificial Sequence: sequence motif"
NIKQDGSEKYYVDSVKG

SEQ ID NO: 1967 - protein, 9 aa, Artificial Sequence
  source: /note="Description of Artificial Sequence: sequence motif"
GWESGWFEP

SEQ ID NO: 1968 - protein, 118 aa, Artificial Sequence; identical to SEQ ID NO: 1844
  source: /note="Description of Artificial Sequence: IL-17RA binding protein"

SEQ ID NO: 1969 - protein, 5 aa, Artificial Sequence
  source: /note="Description of Artificial Sequence: sequence motif"
TYWMR

SEQ ID NO: 1970 - protein, 17 aa, Artificial Sequence
  source: /note="Description of Artificial Sequence: sequence motif"
NIKQDGSEKYYVDSVKG

SEQ ID NO: 1971 - protein, 9 aa, Artificial Sequence
  source: /note="Description of Artificial Sequence: sequence motif"
GWESGWFEP

SEQ ID NO: 1972 - protein, 118 aa, Artificial Sequence; identical to SEQ ID NO: 1844
  source: /note="Description of Artificial Sequence: IL-17RA binding protein"

SEQ ID NO: 1973 - protein, 5 aa, Artificial Sequence
  source: /note="Description of Artificial Sequence: sequence motif"
TYWMR

SEQ ID NO: 1974 - protein, 17 aa, Artificial Sequence
  source: /note="Description of Artificial Sequence: sequence motif"
NIKQDGSEKYYVDSVKG

SEQ ID NO: 1975 - protein, 9 aa, Artificial Sequence
  source: /note="Description of Artificial Sequence: sequence motif"
GWESGWFEP

SEQ ID NO: 1976 - protein, 118 aa, Artificial Sequence
  source: /note="Description of Artificial Sequence: IL-17RA binding protein"
EVQLVESGGGLVQPGGSLRLSCAASGFSLSTYWMRWLRQAPGKGLEWVANIKQDGSEKYYVDSVKGRFTISRDNAKNSLFLQMNSLRAEDTAVYYCARGWESGWFEPWGQGTLVTVSS

SEQ ID NO: 1977 - protein, 5 aa, Artificial Sequence
  source: /note="Description of Artificial Sequence: sequence motif"
TYWMS

SEQ ID NO: 1978 - protein, 17 aa, Artificial Sequence
  source: /note="Description of Artificial Sequence: sequence motif"
NIKQDGSEKYYVDSVKG

SEQ ID NO: 1979 - protein, 9 aa, Artificial Sequence
  source: /note="Description of Artificial Sequence: sequence motif"
GWESGWFEP

SEQ ID NO: 1980 - protein, 118 aa, Artificial Sequence; identical to SEQ ID NO: 1920
  source: /note="Description of Artificial Sequence: IL-17RA binding protein"

SEQ ID NO: 1981 - protein, 5 aa, Artificial Sequence
  source: /note="Description of Artificial Sequence: sequence motif"
TYWMT

SEQ ID NO: 1982 - protein, 17 aa, Artificial Sequence
  source: /note="Description of Artificial Sequence: sequence motif"
NMNQDGSEKYYVDSVKG

SEQ ID NO: 1983 - protein, 9 aa, Artificial Sequence
  source: /note="Description of Artificial Sequence: sequence motif"
GYSSGWFEP

SEQ ID NO: 1984 - protein, 118 aa, Artificial Sequence
  source: /note="Description of Artificial Sequence: IL-17RA binding protein"
EVQLVESGGGLVQPGGSLRLSCEASGFTFSTYWMTWIRQAPGKGLEWVANMNQDGSEKYYVDSVKGRFTISRDNARNSLFLQMNSLRAEDTAMYYCARGYSSGWFEPWGQGTLVTVSS

SEQ ID NO: 1985 - protein, 5 aa, Artificial Sequence
  source: /note="Description of Artificial Sequence: sequence motif"
TYWMT

SEQ ID NO: 1986 - protein, 17 aa, Artificial Sequence
  source: /note="Description of Artificial Sequence: sequence motif"
NMNQDGSEKYYVDSVKG

SEQ ID NO: 1987 - protein, 9 aa, Artificial Sequence
  source: /note="Description of Artificial Sequence: sequence motif"
GYSSGWFEP

SEQ ID NO: 1988 - protein, 118 aa, Artificial Sequence; identical to SEQ ID NO: 1984
  source: /note="Description of Artificial Sequence: IL-17RA binding protein"

SEQ ID NO: 1989 - protein, 5 aa, Artificial Sequence
  source: /note="Description of Artificial Sequence: sequence motif"
TYWMT

SEQ ID NO: 1990 - protein, 17 aa, Artificial Sequence
  source: /note="Description of Artificial Sequence: sequence motif"
NMNQDGSEKYYVDSVKG

SEQ ID NO: 1991 - protein, 9 aa, Artificial Sequence
  source: /note="Description of Artificial Sequence: sequence motif"
GYSSGWFEP

SEQ ID NO: 1992 - protein, 118 aa, Artificial Sequence; identical to SEQ ID NO: 1984
  source: /note="Description of Artificial Sequence: IL-17RA binding protein"

SEQ ID NO: 1993 - protein, 5 aa, Artificial Sequence
  source: /note="Description of Artificial Sequence: sequence motif"
TYWMT

SEQ ID NO: 1994 - protein, 17 aa, Artificial Sequence
  source: /note="Description of Artificial Sequence: sequence motif"
NMNQDGSEKYYVDSVKG

SEQ ID NO: 1995 - protein, 9 aa, Artificial Sequence
  source: /note="Description of Artificial Sequence: sequence motif"
GYSSGWFEP

SEQ ID NO: 1996 - protein, 118 aa, Artificial Sequence; identical to SEQ ID NO: 1984
  source: /note="Description of Artificial Sequence: IL-17RA binding protein"

SEQ ID NO: 1997 - protein, 5 aa, Artificial Sequence
  source: /note="Description of Artificial Sequence: sequence motif"
TYWMT

SEQ ID NO: 1998 - protein, 17 aa, Artificial Sequence
  source: /note="Description of Artificial Sequence: sequence motif"
NMNQDGSEKYYVDSVKG

SEQ ID NO: 1999 - protein, 9 aa, Artificial Sequence
  source: /note="Description of Artificial Sequence: sequence motif"
GYSSGWFEP

SEQ ID NO: 2000 - protein, 118 aa, Artificial Sequence
  source: /note="Description of Artificial Sequence: IL-17RA binding protein"
EVQLVESGGGLVQPGGSLRLSCEASGFTFSTYWMTWIRQAPGKGLEWVANMNQDGSEKYYVDSVKGRFTISRDNARNSLFLQMNSLRAEDTAMYYCARGYSSGWFEPWGQGTLVTLSS

SEQ ID NO: 2001 - protein, 5 aa, Artificial Sequence
  source: /note="Description of Artificial Sequence: sequence motif"
TYWMT

SEQ ID NO: 2002 - protein, 17 aa, Artificial Sequence
  source: /note="Description of Artificial Sequence: sequence motif"
NMNQDGSEKYYVDSVKG

SEQ ID NO: 2003 - protein, 9 aa, Artificial Sequence
  source: /note="Description of Artificial Sequence: sequence motif"
GYSSGWFEP

SEQ ID NO: 2004 - protein, 118 aa, Artificial Sequence; identical to SEQ ID NO: 1808
  source: /note="Description of Artificial Sequence: IL-17RA binding protein"

SEQ ID NO: 2005 - protein, 5 aa, Artificial Sequence
  source: /note="Description of Artificial Sequence: sequence motif"
TYWMT

SEQ ID NO: 2006 - protein, 17 aa, Artificial Sequence
  source: /note="Description of Artificial Sequence: sequence motif"
NMNQDGSEKYYVDSVKG

SEQ ID NO: 2007 - protein, 9 aa, Artificial Sequence
  source: /note="Description of Artificial Sequence: sequence motif"
GYSSGWFEP

SEQ ID NO: 2008 - protein, 118 aa, Artificial Sequence; identical to SEQ ID NO: 1808
  source: /note="Description of Artificial Sequence: IL-17RA binding protein"

SEQ ID NO: 2009 - protein, 5 aa, Artificial Sequence
  source: /note="Description of Artificial Sequence: sequence motif"
TYWMT

SEQ ID NO: 2010 - protein, 17 aa, Artificial Sequence
  source: /note="Description of Artificial Sequence: sequence motif"
NMNQDGSEKYYVDSVKG

SEQ ID NO: 2011 - protein, 9 aa, Artificial Sequence
  source: /note="Description of Artificial Sequence: sequence motif"
GYSSGWFEP

SEQ ID NO: 2012 - protein, 118 aa, Artificial Sequence; identical to SEQ ID NO: 1808
  source: /note="Description of Artificial Sequence: IL-17RA binding protein"

SEQ ID NO: 2013 - protein, 5 aa, Artificial Sequence
  source: /note="Description of Artificial Sequence: sequence motif"
TYWMT

SEQ ID NO: 2014 - protein, 17 aa, Artificial Sequence
  source: /note="Description of Artificial Sequence: sequence motif"
NINQDGSEKQYVDSVKG

SEQ ID NO: 2015 - protein, 9 aa, Artificial Sequence
  source: /note="Description of Artificial Sequence: sequence motif"
GYSSGWFEP

SEQ ID NO: 2016 - protein, 118 aa, Artificial Sequence; identical to SEQ ID NO: 1812
  source: /note="Description of Artificial Sequence: IL-17RA binding protein"

SEQ ID NO: 2017 - protein, 5 aa, Artificial Sequence
  source: /note="Description of Artificial Sequence: sequence motif"
TYWMT

SEQ ID NO: 2018 - protein, 17 aa, Artificial Sequence
  source: /note="Description of Artificial Sequence: sequence motif"
NINQDGSEKQYVDSVKG

SEQ ID NO: 2019 - protein, 9 aa, Artificial Sequence
  source: /note="Description of Artificial Sequence: sequence motif"
GYSSGWFEP

SEQ ID NO: 2020 - protein, 118 aa, Artificial Sequence; identical to SEQ ID NO: 1928
  source: /note="Description of Artificial Sequence: IL-17RA binding protein"

SEQ ID NO: 2021 - protein, 5 aa, Artificial Sequence
  source: /note="Description of Artificial Sequence: sequence motif"
TYWMT

SEQ ID NO: 2022 - protein, 17 aa, Artificial Sequence
  source: /note="Description of Artificial Sequence: sequence motif"
NINQDGSEKQYVDSVKG

SEQ ID NO: 2023 - protein, 9 aa, Artificial Sequence
  source: /note="Description of Artificial Sequence: sequence motif"
GYSSGWFEP

SEQ ID NO: 2024 - protein, 118 aa, Artificial Sequence; identical to SEQ ID NO: 1928
  source: /note="Description of Artificial Sequence: IL-17RA binding protein"

SEQ ID NO: 2025 - protein, 5 aa, Artificial Sequence
  source: /note="Description of Artificial Sequence: sequence motif"
TYWMT

SEQ ID NO: 2026 - protein, 17 aa, Artificial Sequence
  source: /note="Description of Artificial Sequence: sequence motif"
NINQDGSEKQYVDSVKG

SEQ ID NO: 2027 - protein, 9 aa, Artificial Sequence
  source: /note="Description of Artificial Sequence: sequence motif"
GYSSGWFEP

SEQ ID NO: 2028 - protein, 118 aa, Artificial Sequence; identical to SEQ ID NO: 1928
  source: /note="Description of Artificial Sequence: IL-17RA binding protein"

SEQ ID NO: 2029 - protein, 5 aa, Artificial Sequence
  source: /note="Description of Artificial Sequence: sequence motif"
TYWMT

SEQ ID NO: 2030 - protein, 17 aa, Artificial Sequence
  source: /note="Description of Artificial Sequence: sequence motif"
NINQDGSEKQYVDSVKG

SEQ ID NO: 2031 - protein, 9 aa, Artificial Sequence
  source: /note="Description of Artificial Sequence: sequence motif"
GYSSGWFEP

SEQ ID NO: 2032 - protein, 118 aa, Artificial Sequence
  source: /note="Description of Artificial Sequence: IL-17RA binding protein"
EVQLVESGGGLVQPGGSLRLSCAASGFTFSTYWMTWVRQAPGKGLEWVANINQDGSEKQYVDSVKGRFTISRDNAKNSLFLQMISLRAEDTAMYYCARGYSSGWFEPWGQGTLVTVSS

SEQ ID NO: 2033 - protein, 5 aa, Artificial Sequence
  source: /note="Description of Artificial Sequence: sequence motif"
TYWMT

SEQ ID NO: 2034 - protein, 17 aa, Artificial Sequence
  source: /note="Description of Artificial Sequence: sequence motif"
NINQDGSEKQYVDSVKG

SEQ ID NO: 2035 - protein, 9 aa, Artificial Sequence
  source: /note="Description of Artificial Sequence: sequence motif"
GYSSGWFEP

SEQ ID NO: 2036 - protein, 118 aa, Artificial Sequence
  source: /note="Description of Artificial Sequence: IL-17RA binding protein"
EVQLVESGGGLVQPGGSLRLSCTASGFTFSTYWMTWVRQAPGKGLEWVANINQDGSEKQYVDSVKGRFTISRDNAKNSLFLQMISLRAEDTAMYYCARGYSSGWFEPWGQGTMVTVSS

SEQ ID NO: 2037 - protein, 5 aa, Artificial Sequence
  source: /note="Description of Artificial Sequence: sequence motif"
TYWMT

SEQ ID NO: 2038 - protein, 17 aa, Artificial Sequence
  source: /note="Description of Artificial Sequence: sequence motif"
NINQDGSEKYYVDSVKG

SEQ ID NO: 2039 - protein, 9 aa, Artificial Sequence
  source: /note="Description of Artificial Sequence: sequence motif"
GYSSGWFDP

SEQ ID NO: 2040 - protein, 118 aa, Artificial Sequence
  source: /note="Description of Artificial Sequence: IL-17RA binding protein"
EVQLVESGGGLVQPGGSLRLSCAASGFTFSTYWMTWVRQAPGKGLEWVANINQDGSEKYYVDSVKGRFTISRDNAKNSLYLQMNSLRAEDTAMYYCARGYSSGWFDPWGQGTLVTVSS

SEQ ID NO: 2041 - protein, 5 aa, Artificial Sequence
  source: /note="Description of Artificial Sequence: sequence motif"
TYWMT

SEQ ID NO: 2042 - protein, 17 aa, Artificial Sequence
  source: /note="Description of Artificial Sequence: sequence motif"
NINQDGSEKQYVDSVKG

SEQ ID NO: 2043 - protein, 9 aa, Artificial Sequence
  source: /note="Description of Artificial Sequence: sequence motif"
GYSSGWFDP

SEQ ID NO: 2044 - protein, 118 aa, Artificial Sequence; identical to SEQ ID NO: 1824
  source: /note="Description of Artificial Sequence: IL-17RA binding protein"

SEQ ID NO: 2045 - protein, 5 aa, Artificial Sequence
  source: /note="Description of Artificial Sequence: sequence motif"
TYWMT

SEQ ID NO: 2046 - protein, 17 aa, Artificial Sequence
  source: /note="Description of Artificial Sequence: sequence motif"
NINQDGSEKQYVDSVKG

SEQ ID NO: 2047 - protein, 9 aa, Artificial Sequence
  source: /note="Description of Artificial Sequence: sequence motif"
GYSSGWFDP

SEQ ID NO: 2048 - protein, 118 aa, Artificial Sequence; identical to SEQ ID NO: 1824
  source: /note="Description of Artificial Sequence: IL-17RA binding protein"

SEQ ID NO: 2049 - protein, 5 aa, Artificial Sequence
  source: /note="Description of Artificial Sequence: sequence motif"
TYWMS

SEQ ID NO: 2050 - protein, 17 aa, Artificial Sequence
  source: /note="Description of Artificial Sequence: sequence motif"
NMNQDGSEKYYVDSVKG

SEQ ID NO: 2051 - protein, 9 aa, Artificial Sequence
  source: /note="Description of Artificial Sequence: sequence motif"
GYSSGWFDP

SEQ ID NO: 2052 - protein, 118 aa, Artificial Sequence
  source: /note="Description of Artificial Sequence: IL-17RA binding protein"
  MOD_RES (110)..(110): Any amino acid
QVQLVESGGGLVQPGGSLRLSCAASGFTFSTYWMSRLRQAPGKGLEWVANMNQDGSEKYYVDSVKGRFTISRDNAKNSLYLQMNSLRAEDTAVYYCARGYSSGWFDPWGXGTLVTVSS

SEQ ID NO: 2053 - protein, 5 aa, Artificial Sequence
  source: /note="Description of Artificial Sequence: sequence motif"
TYWMS

SEQ ID NO: 2054 - protein, 17 aa, Artificial Sequence
  source: /note="Description of Artificial Sequence: sequence motif"
NIKQDGSEKYYVDSVKG

SEQ ID NO: 2055 - protein, 9 aa, Artificial Sequence
  source: /note="Description of Artificial Sequence: sequence motif"
GWESGWFEP

SEQ ID NO: 2056 - protein, 118 aa, Artificial Sequence
  source: /note="Description of Artificial Sequence: IL-17RA binding protein"
EVQLVESGGGLVQPGGSLRLSCAASGFPFSTYWMSWVRQAPGKGLEWVANIKQDGSEKYYVDSVKGRFTISRDNAKDSLYLQMNSLRAEDTAVYYCARGWESGWFEPWGQGTLVTVSS

SEQ ID NO: 2057 - protein, 5 aa, Artificial Sequence
  source: /note="Description of Artificial Sequence: sequence motif"
TYWMS

SEQ ID NO: 2058 - protein, 17 aa, Artificial Sequence
  source: /note="Description of Artificial Sequence: sequence motif"
NIKQDGSEKYYVDSVKG

SEQ ID NO: 2059 - protein, 9 aa, Artificial Sequence
  source: /note="Description of Artificial Sequence: sequence motif"
GWESGWFEP

SEQ ID NO: 2060 - protein, 118 aa, Artificial Sequence; identical to SEQ ID NO: 2056
  source: /note="Description of Artificial Sequence: IL-17RA binding protein"

SEQ ID NO: 2061 - protein, 5 aa, Artificial Sequence
  source: /note="Description of Artificial Sequence: sequence motif"
TYWMS

SEQ ID NO: 2062 - protein, 17 aa, Artificial Sequence
  source: /note="Description of Artificial Sequence: sequence motif"
NIKQDGSEKYYVDSVKG

SEQ ID NO: 2063 - protein, 9 aa, Artificial Sequence
  source: /note="Description of Artificial Sequence: sequence motif"
GWESGWFEP

SEQ ID NO: 2064 - protein, 118 aa, Artificial Sequence; identical to SEQ ID NO: 2056
  source: /note="Description of Artificial Sequence: IL-17RA binding protein"

SEQ ID NO: 2065 - protein, 5 aa, Artificial Sequence
  source: /note="Description of Artificial Sequence: sequence motif"
TYWMS

SEQ ID NO: 2066 - protein, 17 aa, Artificial Sequence
  source: /note="Description of Artificial Sequence: sequence motif"
NIKQDGSEKYYVDSVKG

SEQ ID NO: 2067 - protein, 9 aa, Artificial Sequence
  source: /note="Description of Artificial Sequence: sequence motif"
GWESGWFEP

SEQ ID NO: 2068 - protein, 118 aa, Artificial Sequence
  source: /note="Description of Artificial Sequence: IL-17RA binding protein"
EVQLVESGGGLVQPGGSLRLSCAASGFPFSTYWMSWVRQAPGKGLEWVANIKQDGSEKYYVDSVKGRFTISRDNAKDSLFLQMNSLRAEDTAVYYCARGWESGWFEPWGQGTLVTVSS

SEQ ID NO: 2069 - protein, 5 aa, Artificial Sequence
  source: /note="Description of Artificial Sequence: sequence motif"
TYWMS

SEQ ID NO: 2070 - protein, 17 aa, Artificial Sequence
  source: /note="Description of Artificial Sequence: sequence motif"
NIKQDGSEKYYVDSVKG

SEQ ID NO: 2071 - protein, 9 aa, Artificial Sequence
  source: /note="Description of Artificial Sequence: sequence motif"
GWESGWFEP

SEQ ID NO: 2072 - protein, 118 aa, Artificial Sequence; identical to SEQ ID NO: 2068
  source: /note="Description of Artificial Sequence: IL-17RA binding protein"

SEQ ID NO: 2073 - protein, 5 aa, Artificial Sequence
  source: /note="Description of Artificial Sequence: sequence motif"
TYWMT

SEQ ID NO: 2074 - protein, 17 aa, Artificial Sequence
  source: /note="Description of Artificial Sequence: sequence motif"
NINQDGSEKQYVDSVKG

SEQ ID NO: 2075 - protein, 9 aa, Artificial Sequence
  source: /note="Description of Artificial Sequence: sequence motif"
GYSSGWFEP

SEQ ID NO: 2076 - protein, 118 aa, Artificial Sequence
  source: /note="Description of Artificial Sequence: IL-17RA binding protein"
EVQLVESGGGLVHPGGSLRLSCAASGFTFSTYWMTWVRQAPGKGLEWVANINQDGSEKQYVDSVKGRFTISRDNAKNSLFLQMISLRAEDAAMYYCARGYSSGWFEPWGQGTLVTVSS

SEQ ID NO: 2077 - protein, 5 aa, Artificial Sequence
  source: /note="Description of Artificial Sequence: sequence motif"
SYWMT

SEQ ID NO: 2078 - protein, 17 aa, Artificial Sequence
  source: /note="Description of Artificial Sequence: sequence motif"
NMNQDGSEKYYVDSVKG

SEQ ID NO: 2079 - protein, 9 aa, Artificial Sequence
  source: /note="Description of Artificial Sequence: sequence motif"
GYSSGWFEP

SEQ ID NO: 2080 - protein, 118 aa, Artificial Sequence
  source: /note="Description of Artificial Sequence: IL-17RA binding protein"
EVQLVESGGGLVQPGGSLRLSCAASGFTFSSYWMTWIRQAPGKGLEWVANMNQDGSEKYYVDSVKGRFTISRDNARNSLFLQMNSLRAEDTAMYYCARGYSSGWFEPWGQGTLVTVSS

SEQ ID NO: 2081 - protein, 5 aa, Artificial Sequence
  source: /note="Description of Artificial Sequence: sequence motif"
TYWMT

SEQ ID NO: 2082 - protein, 17 aa, Artificial Sequence
  source: /note="Description of Artificial Sequence: sequence motif"
NINQDGSEKQYVDSVKG

SEQ ID NO: 2083 - protein, 9 aa, Artificial Sequence
  source: /note="Description of Artificial Sequence: sequence motif"
GYSSGWFEP

SEQ ID NO: 2084 - protein, 118 aa, Artificial Sequence; identical to SEQ ID NO: 1816
  source: /note="Description of Artificial Sequence: IL-17RA binding protein"

SEQ ID NO: 2085 - protein, 5 aa, Artificial Sequence
  source: /note="Description of Artificial Sequence: sequence motif"
TYWMT

SEQ ID NO: 2086 - protein, 17 aa, Artificial Sequence
  source: /note="Description of Artificial Sequence: sequence motif"
NINQDGTEKQYVDSVKG

SEQ ID NO: 2087 - protein, 9 aa, Artificial Sequence
  source: /note="Description of Artificial Sequence: sequence motif"
GYSSGWFDP

SEQ ID NO: 2088 - protein, 118 aa, Artificial Sequence
  source: /note="Description of Artificial Sequence: IL-17RA binding protein"
EVQLVESGGGLVQPGGSLRLSCAASGFPFSTYWMTWVRQAPGKGLDWVANINQDGTEKQYVDSVKGRFTISRDNAKNSLFLQMNSLRAEDTAMYYCARGYSSGWFDPWGQGTLVTVSS

SEQ ID NO: 2089 - protein, 5 aa, Artificial Sequence
  source: /note="Description of Artificial Sequence: sequence motif"
TYWMT

SEQ ID NO: 2090 - protein, 17 aa, Artificial Sequence
  source: /note="Description of Artificial Sequence: sequence motif"
NINHDGSEQYYVDSVKG

SEQ ID NO: 2091 - protein, 9 aa, Artificial Sequence
  source: /note="Description of Artificial Sequence: sequence motif"
GYSSGWFDP

SEQ ID NO: 2092 - protein, 118 aa, Artificial Sequence
  source: /note="Description of Artificial Sequence: IL-17RA binding protein"
EVQLVESGGGLVQPGGSLRLSCAASGFTFSTYWMTWVRQAPGKGLEWVANINHDGSEQYYVDSVKGRFTISRDNAKNSLYLQMNSLRAEDTAVYHCARGYSSGWFDPWGQGTLVTVSS

SEQ ID NO: 2093 - protein, 5 aa, Artificial Sequence
  source: /note="Description of Artificial Sequence: sequence motif"
TYWMT

SEQ ID NO: 2094 - protein, 17 aa, Artificial Sequence
  source: /note="Description of Artificial Sequence: sequence motif"
NINQDGSEQYYVDSVKG

SEQ ID NO: 2095 - protein, 9 aa, Artificial Sequence
  source: /note="Description of Artificial Sequence: sequence motif"
GYSNGWFDP

SEQ ID NO: 2096 - protein, 118 aa, Artificial Sequence
  source: /note="Description of Artificial Sequence: IL-17RA binding protein"
EVQLVESGGGLVQPGGSLRLSCAASGFTFSTYWMTWVRQAPGKGLEWVANINQDGSEQYYVDSVKGRFTISRDNAKNSLYLQMNSLRAEDTAVYHCARGYSNGWFDPWGQGTLVTVSS

SEQ ID NO: 2097 - protein, 5 aa, Artificial Sequence
  source: /note="Description of Artificial Sequence: sequence motif"
TYWMT

SEQ ID NO: 2098 - protein, 17 aa, Artificial Sequence
  source: /note="Description of Artificial Sequence: sequence motif"
NINQDGSEEYYVDSVKG

SEQ ID NO: 2099 - protein, 9 aa, Artificial Sequence
  source: /note="Description of Artificial Sequence: sequence motif"
GYSSGWFDP

SEQ ID NO: 2100 - protein, 118 aa, Artificial Sequence
  source: /note="Description of Artificial Sequence: IL-17RA binding protein"
EVQLVESGGGLVQPGRSLRLSCAASGFTFSTYWMTWVRQAPGKGLEWVANINQDGSEEYYVDSVKGRFTISRDNAKNSLYLQMNSLRAEDTAVYHCARGYSSGWFDPWGQGTLVTVSS

SEQ ID NO: 2101 - protein, 5 aa, Artificial Sequence
  source: /note="Description of Artificial Sequence: sequence motif"
TYWMT

SEQ ID NO: 2102 - protein, 17 aa, Artificial Sequence
  source: /note="Description of Artificial Sequence: sequence motif"
NINQDGSEQYYVDSVEG

SEQ ID NO: 2103 - protein, 9 aa, Artificial Sequence
  source: /note="Description of Artificial Sequence: sequence motif"
GYSNGWFDP

SEQ ID NO: 2104 - protein, 118 aa, Artificial Sequence
  source: /note="Description of Artificial Sequence: IL-17RA binding protein"
EVQLVESGGGLVQPGGSLRLSCAASGFTFSTYWMTWVRQAPGKGLEWVANINQDGSEQYYVDSVEGRFTISRDNAKNSLYLQMNSLRAEDTALYHCARGYSNGWFDPWGQGTLVTVSS

SEQ ID NO: 2105 - protein, 5 aa, Artificial Sequence
  source: /note="Description of Artificial Sequence: sequence motif"
TYWMT

SEQ ID NO: 2106 - protein, 17 aa, Artificial Sequence
  source: /note="Description of Artificial Sequence: sequence motif"
NMNQDGSEKHYVDSVKG

SEQ ID NO: 2107 - protein, 9 aa, Artificial Sequence
  source: /note="Description of Artificial Sequence: sequence motif"
GYSSGWFEP

SEQ ID NO: 2108 - protein, 118 aa, Artificial Sequence
  source: /note="Description of Artificial Sequence: IL-17RA binding protein"
EVQLVESGGGLVQPGRSLRLSCAASGFTFSTYWMTWIRQAPGKGLEWVANMNQDGSEKHYVDSVKGRFTISRDNARNSLFLQMNSLRAEDTAMYYCARGYSSGWFEPWGQGTLVTVSS

SEQ ID NO: 2109 - protein, 5 aa, Artificial Sequence
  source: /note="Description of Artificial Sequence: sequence motif"
SYWMS

SEQ ID NO: 2110 - protein, 17 aa, Artificial Sequence
  source: /note="Description of Artificial Sequence: sequence motif"
NMNQDGSEKYYVDSVKG

SEQ ID NO: 2111 - protein, 9 aa, Artificial Sequence
  source: /note="Description of Artificial Sequence: sequence motif"
GYSSGWFEP

SEQ ID NO: 2112 - protein, 118 aa, Artificial Sequence
  source: /note="Description of Artificial Sequence: IL-17RA binding protein"
EVQLVESGGGLVQPGGSLRLSCAASGFTFSSYWMSWVRQAPGKGLEWVANMNQDGSEKYYVDSVKGRFTISRDNARNSLFLQMNSLRAEDTAMYYCARGYSSGWFEPWGQGTLVTVSS

SEQ ID NO: 2113 - protein, 5 aa, Artificial Sequence
  source: /note="Description of Artificial Sequence: sequence motif"
TYWMT

SEQ ID NO: 2114 - protein, 17 aa, Artificial Sequence
  source: /note="Description of Artificial Sequence: sequence motif"
NMNQDGSEKYYVDSVKG

SEQ ID NO: 2115 - protein, 9 aa, Artificial Sequence
  source: /note="Description of Artificial Sequence: sequence motif"
GYSSGWFEP

SEQ ID NO: 2116 - protein, 118 aa, Artificial Sequence
  source: /note="Description of Artificial Sequence: IL-17RA binding protein"
EVQLVESGGGLVQPGGSLRLSCAASGFTFSTYWMTWVRQAPGKGLEWVANMNQDGSEKYYVDSVKGRFAISRDNARNSLFLQMNSLRAEDTAMYYCARGYSSGWFEPWGQGTLVTVSS

SEQ ID NO: 2117 - protein, 5 aa, Artificial Sequence
  source: /note="Description of Artificial Sequence: sequence motif"
TYWMT

SEQ ID NO: 2118 - protein, 17 aa, Artificial Sequence
  source: /note="Description of Artificial Sequence: sequence motif"
NINQDGSEHQYVDSVKG

SEQ ID NO: 2119 - protein, 9 aa, Artificial Sequence
  source: /note="Description of Artificial Sequence: sequence motif"
GYSSGWFEP

SEQ ID NO: 2120 - protein, 118 aa, Artificial Sequence
  source: /note="Description of Artificial Sequence: IL-17RA binding protein"
QVQLVESGGGLVQPGGSLSLSCAASGFTFSTYWMTWVRQAPGKGLEWVANINQDGSEHQYVDSVKGRFTISRDNAKNSLYLQMNSLRAEDTAVYYCARGYSSGWFEPWGQGTLVTVSS

SEQ ID NO: 2121 - protein, 5 aa, Artificial Sequence
  source: /note="Description of Artificial Sequence: sequence motif"
TYWMT

SEQ ID NO: 2122 - protein, 17 aa, Artificial Sequence
  source: /note="Description of Artificial Sequence: sequence motif"
NINQDGSEHQYVDSVKG

SEQ ID NO: 2123 - protein, 9 aa, Artificial Sequence
  source: /note="Description of Artificial Sequence: sequence motif"
GYSSGWFEP

SEQ ID NO: 2124 - protein, 118 aa, Artificial Sequence
  source: /note="Description of Artificial Sequence: IL-17RA binding protein"
EVQLVESGGGLVQPGGSLSLSCAASGFTFSTYWMTWVRQAPGKGLEWVANINQDGSEHQYVDSVKGRFTISRDNAKNSLYLQMNNLRAEDTAVYYCARGYSSGWFEPWGQGTLVTVSS

SEQ ID NO: 2125 - protein, 5 aa, Artificial Sequence
  source: /note="Description of Artificial Sequence: sequence motif"
SYWMS

SEQ ID NO: 2126 - protein, 17 aa, Artificial Sequence
  source: /note="Description of Artificial Sequence: sequence motif"
NIKEDGSEKYYVDSVKG

SEQ ID NO: 2127 - protein, 9 aa, Artificial Sequence
  source: /note="Description of Artificial Sequence: sequence motif"
GYSSGWFEP

SEQ ID NO: 2128 - protein, 118 aa, Artificial Sequence
  source: /note="Description of Artificial Sequence: IL-17RA binding protein"
EVQLVESGGGLVQPGGSLRLSCAASGFTFSSYWMSWVRQAPGKGLEWVANIKEDGSEKYYVDSVKGRFTISRDNAKNSLYLQMNSLRAEDTAMYYCARGYSSGWFEPWGQGTLVTVSS

SEQ ID NO: 2129 - protein, 5 aa, Artificial Sequence
  source: /note="Description of Artificial Sequence: sequence motif"
NYDIS

SEQ ID NO: 2130 - protein, 17 aa, Artificial Sequence
  source: /note="Description of Artificial Sequence: sequence motif"
WMNPDSGNTGYAQKFQG

SEQ ID NO: 2131 - protein, 10 aa, Artificial Sequence
  source: /note="Description of Artificial Sequence: sequence motif"
GGYNAWRTDY

SEQ ID NO: 2132 - protein, 119 aa, Artificial Sequence
  source: /note="Description of Artificial Sequence: IL-17RA binding protein"
QVQLVQSGAEVKKPGASVKVSCKASGYPFTNYDISWIRQATGQSLEWMGWMNPDSGNTGYAQKFQGRVTMTRNTSISTAYMELSGLRSEDTAVYFCARGGYNAWRTDYWGQGTLVTVSS

SEQ ID NO: 2133 - protein, 5 aa, Artificial Sequence
  source: /note="Description of Artificial Sequence: sequence motif"
NYDIS

SEQ ID NO: 2134 - protein, 17 aa, Artificial Sequence
  source: /note="Description of Artificial Sequence: sequence motif"
WMNPNSGNTGYAQKFQG

SEQ ID NO: 2135 - protein, 10 aa, Artificial Sequence
  source: /note="Description of Artificial Sequence: sequence motif"
GDSGSWREDY

SEQ ID NO: 2136 - protein, 119 aa, Artificial Sequence
  source: /note="Description of Artificial Sequence: IL-17RA binding protein"
QVQLVQSGAEVKNPGASVKVSCKASGYTFTNYDISWVRQATGRSLEYMGWMNPNSGNTGYAQKFQGRVTMTRNTSISTAYMELSSLTSEDTAIYYCARGDSGSWREDYWGQGTLVTVSS

SEQ ID NO: 2137 - protein, 5 aa, Artificial Sequence
  source: /note="Description of Artificial Sequence: sequence motif"
NYDIS

SEQ ID NO: 2138 - protein, 17 aa, Artificial Sequence
  source: /note="Description of Artificial Sequence: sequence motif"
WMNPNSGNTGYAQKFQG

SEQ ID NO: 2139 - protein, 10 aa, Artificial Sequence
  source: /note="Description of Artificial Sequence: sequence motif"
GDSGSWREDY

SEQ ID NO: 2140 - protein, 119 aa, Artificial Sequence; identical to SEQ ID NO: 2136
  source: /note="Description of Artificial Sequence: IL-17RA binding protein"

SEQ ID NO: 2141 - protein, 5 aa, Artificial Sequence
  source: /note="Description of Artificial Sequence: sequence motif"
NYDIS

SEQ ID NO: 2142 - protein, 17 aa, Artificial Sequence
  source: /note="Description of Artificial Sequence: sequence motif"
WMNPNSGNTDYAQKFQG

SEQ ID NO: 2143 - protein, 10 aa, Artificial Sequence
  source: /note="Description of Artificial Sequence: sequence motif"
GDSGSWREDY

SEQ ID NO: 2144 - protein, 119 aa, Artificial Sequence
  source: /note="Description of Artificial Sequence: IL-17RA binding protein"
QVQLVQSGAGVKNPGASVKVSCKASGYTFTNYDISWVRQATGRSLEYMGWMNPNSGNTDYAQKFQGRVTMTRNTSISTAYMELSSLTSEDTAVYYCARGDSGSWREDYWGQGTLVTVSS

SEQ ID NO: 2145 - protein, 5 aa, Artificial Sequence
  source: /note="Description of Artificial Sequence: sequence motif"
NYDIS

SEQ ID NO: 2146 - protein, 17 aa, Artificial Sequence
  source: /note="Description of Artificial Sequence: sequence motif"
WMNPNSGNTGYAQKFQG

SEQ ID NO: 2147 - protein, 10 aa, Artificial Sequence
  source: /note="Description of Artificial Sequence: sequence motif"
GDSGSWREDY

SEQ ID NO: 2148 - protein, 119 aa, Artificial Sequence
  source: /note="Description of Artificial Sequence: IL-17RA binding protein"
QVQLVQSGAEVKNPGASVKVSCKASGYTFTNYDISWVRQATGRSLEWMGWMNPNSGNTGYAQKFQGRVTMTRNTSISTAYMELSSLTSEDTAVYYCARGDSGSWREDYWGQGTLVTVSS

SEQ ID NO: 2149 - protein, 5 aa, Artificial Sequence
  source: /note="Description of Artificial Sequence: sequence motif"
NYDIS

SEQ ID NO: 2150 - protein, 17 aa, Artificial Sequence
  source: /note="Description of Artificial Sequence: sequence motif"
WMNPNSGNTGYAQKFQG

SEQ ID NO: 2151 - protein, 10 aa, Artificial Sequence
  source: /note="Description of Artificial Sequence: sequence motif"
GDSGSWREDY

SEQ ID NO: 2152 - protein, 119 aa, Artificial Sequence
  source: /note="Description of Artificial Sequence: IL-17RA binding protein"
QVQLQQSGAEVKNPGASVKVSCKASGYTFTNYDISWVRQATGRSLEWMGWMNPNSGNTGYAQKFQGRVTMTRNTSISTAYMELSSLTSEDTAVYYCARGDSGSWREDYWGQGTLVTVSS

SEQ ID NO: 2153 - protein, 5 aa, Artificial Sequence
  source: /note="Description of Artificial Sequence: sequence motif"
NYDIS

SEQ ID NO: 2154 - protein, 17 aa, Artificial Sequence
  source: /note="Description of Artificial Sequence: sequence motif"
WMNPNSGNTGYAQKFQG

SEQ ID NO: 2155 - protein, 10 aa, Artificial Sequence
  source: /note="Description of Artificial Sequence: sequence motif"
GDSGSWREDY

SEQ ID NO: 2156 - protein, 119 aa, Artificial Sequence; identical to SEQ ID NO: 2148
  source: /note="Description of Artificial Sequence: IL-17RA binding protein"

SEQ ID NO: 2157 - protein, 5 aa, Artificial Sequence
  source: /note="Description of Artificial Sequence: sequence motif"
SYDIS

SEQ ID NO: 2158 - protein, 17 aa, Artificial Sequence
  source: /note="Description of Artificial Sequence: sequence motif"
WMNPNSGNTGYAQKFQG

SEQ ID NO: 2159 - protein, 10 aa, Artificial Sequence
  source: /note="Description of Artificial Sequence: sequence motif"
GDSGSWREDY

SEQ ID NO: 2160 - protein, 119 aa, Artificial Sequence
  source: /note="Description of Artificial Sequence: IL-17RA binding protein"
QVQLVQSGAEVKNPGASVKVSCKASGYTFTSYDISWVRQATGRSLEYMGWMNPNSGNTGYAQKFQGRVTMTRNTSISTAYMELSSLRSEDTAVYYCARGDSGSWREDYWGQGTLVTVSS

SEQ ID NO: 2161 - protein, 5 aa, Artificial Sequence
  source: /note="Description of Artificial Sequence: sequence motif"
SYDIS

SEQ ID NO: 2162 - protein, 17 aa, Artificial Sequence
  source: /note="Description of Artificial Sequence: sequence motif"
WMNPNSGNTGYAQKFQG

SEQ ID NO: 2163 - protein, 10 aa, Artificial Sequence
  source: /note="Description of Artificial Sequence: sequence motif"
GDSGSWREDY

SEQ ID NO: 2164 - protein, 119 aa, Artificial Sequence
  source: /note="Description of Artificial Sequence: IL-17RA binding protein"
QVQLVQSGAEVKKPGASVKVSCKASGYTFTSYDISWVRQATGRSLEYMGWMNPNSGNTGYAQKFQGRVTMTRNTSISTAYMELSSLRSEDTAVYYCARGDSGSWREDYWGQGTLVTVSS

SEQ ID NO: 2165 - protein, 5 aa, Artificial Sequence
  source: /note="Description of Artificial Sequence: sequence motif"
SYDIS

SEQ ID NO: 2166 - protein, 17 aa, Artificial Sequence
  source: /note="Description of Artificial Sequence: sequence motif"
WMNPNSGNTGYAQKFQG

SEQ ID NO: 2167 - protein, 10 aa, Artificial Sequence
  source: /note="Description of Artificial Sequence: sequence motif"
GDSGSWREDY

SEQ ID NO: 2168 - protein, 119 aa, Artificial Sequence; identical to SEQ ID NO: 2160
  source: /note="Description of Artificial Sequence: IL-17RA binding protein"

SEQ ID NO: 2169 - protein, 5 aa, Artificial Sequence
  source: /note="Description of Artificial Sequence: sequence motif"
NYDIS

SEQ ID NO: 2170 - protein, 17 aa, Artificial Sequence
  source: /note="Description of Artificial Sequence: sequence motif"
WMNPNSGNTGYAQKFQG

SEQ ID NO: 2171 - protein, 10 aa, Artificial Sequence
  source: /note="Description of Artificial Sequence: sequence motif"
GDSGSWREDY

SEQ ID NO: 2172 - protein, 119 aa, Artificial Sequence
  source: /note="Description of Artificial Sequence: IL-17RA binding protein"
QVQLVQSGAEVKNPGASVKVSCKASGYTFSNYDISWVRQATGRSLEYMGWMNPNSGNTGYAQKFQGRVTMTRNTSISTAYMELSSLTSEDTAVYYCARGDSGSWREDYWGQGTLVTVSS

SEQ ID NO: 2173 - protein, 5 aa, Artificial Sequence
  source: /note="Description of Artificial Sequence: sequence motif"
NYDIS

SEQ ID NO: 2174 - protein, 17 aa, Artificial Sequence
  source: /note="Description of Artificial Sequence: sequence motif"
WMNPKSGNTGYSQKFQG

SEQ ID NO: 2175 - protein, 10 aa, Artificial Sequence
  source: /note="Description of Artificial Sequence: sequence motif"
GDSGSWREDY

SEQ ID NO: 2176 - protein, 119 aa, Artificial Sequence
  source: /note="Description of Artificial Sequence: IL-17RA binding protein"
QVQLVQSGAEVKNPGASVKVSCKASGYTFTNYDISWVRQATGRSLEWMGWMNPKSGNTGYSQKFQGRVTMTRNTSISTAYMELSSLSSEDTAVYYCARGDSGSWREDYWGQGTLVTVSS

SEQ ID NO: 2177 - protein, 5 aa, Artificial Sequence
  source: /note="Description of Artificial Sequence: sequence motif"
NYDIS

SEQ ID NO: 2178 - protein, 17 aa, Artificial Sequence
  source: /note="Description of Artificial Sequence: sequence motif"
WMNPKSGNTGYSQKFQG

SEQ ID NO: 2179 - protein, 10 aa, Artificial Sequence
  source: /note="Description of Artificial Sequence: sequence motif"
GDSGSWREDY

SEQ ID NO: 2180 - protein, 119 aa, Artificial Sequence
  source: /note="Description of Artificial Sequence: IL-17RA binding protein"
QVQLVQSGAEVKNPGASVKVSCKASGYTFTNYDISWVRQATGRSLEWMGWMNPKSGNTGYSQKFQGRVTMTRNTSISTAYMELSSLSSEDTAVYYCARGDSGSWREDYWGQGTLVAVSS

SEQ ID NO: 2181 - protein, 5 aa, Artificial Sequence
  source: /note="Description of Artificial Sequence: sequence motif"
NYDIS

SEQ ID NO: 2182 - protein, 17 aa, Artificial Sequence
  source: /note="Description of Artificial Sequence: sequence motif"
WMNPNSGNTGYAQKFQG

SEQ ID NO: 2183 - protein, 10 aa, Artificial Sequence
  source: /note="Description of Artificial Sequence: sequence motif"
GDFGSWREDY

SEQ ID NO: 2184 - protein, 119 aa, Artificial Sequence
  source: /note="Description of Artificial Sequence: IL-17RA binding protein"
QVQLVQSGAEVKKPGASVKVSCKASGYTFINYDISWVRQATGRSLEWMGWMNPNSGNTGYAQKFQGRVTMTRNTSTSTAYMELSSLTSEDTAVYYCARGDFGSWREDYWGQGTLVTVSS

SEQ ID NO: 2185 - protein, 5 aa, Artificial Sequence
  source: /note="Description of Artificial Sequence: sequence motif"
SYDIS

SEQ ID NO: 2186 - protein, 17 aa, Artificial Sequence
  source: /note="Description of Artificial Sequence: sequence motif"
WMNPNSGNTGYAQKFQG

SEQ ID NO: 2187 - protein, 10 aa, Artificial Sequence
  source: /note="Description of Artificial Sequence: sequence motif"
GNSGSWREDY

SEQ ID NO: 2188 - protein, 119 aa, Artificial Sequence
  source: /note="Description of Artificial Sequence: IL-17RA binding protein"
QVQLVQSGAEVKNPGASVKVSCKASGYTFTSYDISWVRQATGRSLEYMGWMNPNSGNTGYAQKFQGRVTMTRNTSISTAYMELSSLRSEDTAVYYCARGNSGSWREDYWGQGTLVTVSS

SEQ ID NO: 2189 - protein, 5 aa, Artificial Sequence
  source: /note="Description of Artificial Sequence: sequence motif"
SYDIS

SEQ ID NO: 2190 - protein, 17 aa, Artificial Sequence
  source: /note="Description of Artificial Sequence: sequence motif"
WMNPNSGNTGYAQKFQG

SEQ ID NO: 2191 - protein, 10 aa, Artificial Sequence
  source: /note="Description of Artificial Sequence: sequence motif"
GDRGNWRQDY

SEQ ID NO: 2192 - protein, 119 aa, Artificial Sequence
  source: /note="Description of Artificial Sequence: IL-17RA binding protein"
QVQLVQSGAEVKKPGASVKVSCKASGYTFTSYDISWMRQATGRSLEYMGWMNPNSGNTGYAQKFQGRVTMTRNTSISTAYMELSSLRSEDTAVYYCARGDRGNWRQDYWGQGTLVTVSS

SEQ ID NO: 2193 - protein, 5 aa, Artificial Sequence
  source: /note="Description of Artificial Sequence: sequence motif"
NYGIS

SEQ ID NO: 2194 - protein, 17 aa, Artificial Sequence
  source: /note="Description of Artificial Sequence: sequence motif"
WMNPNSGNTGYAQKFQG

SEQ ID NO: 2195 - protein, 10 aa, Artificial Sequence
  source: /note="Description of Artificial Sequence: sequence motif"
GDSGSWREDY

SEQ ID NO: 2196 - protein, 119 aa, Artificial Sequence
  source: /note="Description of Artificial Sequence: IL-17RA binding protein"
QVQLQQSGAEVKNPGASVKVSCKASGYTFSNYGISWVRQATGRSLEYMGWMNPNSGNTGYAQKFQGRVTMTRNTSISTAYMELSSLTSEDTAVYYCARGDSGSWREDYWGQGTLVTVSS

SEQ ID NO: 2197 - protein, 5 aa, Artificial Sequence
  source: /note="Description of Artificial Sequence: sequence motif"
SYDIS

SEQ ID NO: 2198 - protein, 17 aa, Artificial Sequence
  source: /note="Description of Artificial Sequence: sequence motif"
WMNPNSGNTGYAQKFQG

SEQ ID NO: 2199 - protein, 10 aa, Artificial Sequence
  source: /note="Description of Artificial Sequence: sequence motif"
GGSSAWRTDY

SEQ ID NO: 2200 - protein, 119 aa, Artificial Sequence
  source: /note="Description of Artificial Sequence: IL-17RA binding protein"
QVQLVQSGAEVKKPGASVKVSCKASGYTFTSYDISWVRQATGQSLEYMGWMNPNSGNTGYAQKFQGRVTMTRNTSISTAYMELSSLRSEDTAVYFCARGGSSAWRTDYWGQGTLVTVSS

SEQ ID NO: 2201 - protein, 5 aa, Artificial Sequence
  source: /note="Description of Artificial Sequence: sequence motif"
SYDIS

SEQ ID NO: 2202 - protein, 17 aa, Artificial Sequence
  source: /note="Description of Artificial Sequence: sequence motif"
WMNPNSGNTGYAQKFQG

SEQ ID NO: 2203 - protein, 10 aa, Artificial Sequence
  source: /note="Description of Artificial Sequence: sequence motif"
GGSSAWRTDY

SEQ ID NO: 2204 - protein, 119 aa, Artificial Sequence; identical to SEQ ID NO: 2200
  source: /note="Description of Artificial Sequence: IL-17RA binding protein"

SEQ ID NO: 2205 - protein, 5 aa, Artificial Sequence
  source: /note="Description of Artificial Sequence: sequence motif"
SYDIS

SEQ ID NO: 2206 - protein, 17 aa, Artificial Sequence
  source: /note="Description of Artificial Sequence: sequence motif"
WMNPNSGNTGYAQKFQG

SEQ ID NO: 2207 - protein, 10 aa, Artificial Sequence
  source: /note="Description of Artificial Sequence: sequence motif"
GGSSAWRTDY

SEQ ID NO: 2208 - protein, 119 aa, Artificial Sequence; identical to SEQ ID NO: 2200
  source: /note="Description of Artificial Sequence: IL-17RA binding protein"

SEQ ID NO: 2209 - protein, 5 aa, Artificial Sequence
  source: /note="Description of Artificial Sequence: sequence motif"
SYDIS

SEQ ID NO: 2210 - protein, 17 aa, Artificial Sequence
  source: /note="Description of Artificial Sequence: sequence motif"
WMNPNSGNTGYAQKFQG

SEQ ID NO: 2211 - protein, 10 aa, Artificial Sequence
  source: /note="Description of Artificial Sequence: sequence motif"
GGSSAWRTDY

SEQ ID NO: 2212 - protein, 119 aa, Artificial Sequence
  source: /note="Description of Artificial Sequence: IL-17RA binding protein"
QVQLVQSGAEVKKPGASVKVSCKASGYTFTSYDISWVRQATGQSLEYMGWMNPNSGNTGYAQKFQGRVTMTRNTSISTAYMELSSLRSEDTAVYYCARGGSSAWRTDYWGQGTLVTVSS

SEQ ID NO: 2213 - protein, 5 aa, Artificial Sequence
  source: /note="Description of Artificial Sequence: sequence motif"
SYDIS

SEQ ID NO: 2214 - protein, 17 aa, Artificial Sequence
  source: /note="Description of Artificial Sequence: sequence motif"
WMNPNSGNTGYAQKFQG

SEQ ID NO: 2215 - protein, 10 aa, Artificial Sequence
  source: /note="Description of Artificial Sequence: sequence motif"
GGSSAWRTDY

SEQ ID NO: 2216 - protein, 119 aa, Artificial Sequence; identical to SEQ ID NO: 2212
  source: /note="Description of Artificial Sequence: IL-17RA binding protein"

SEQ ID NO: 2217 - protein, 5 aa, Artificial Sequence
  source: /note="Description of Artificial Sequence: sequence motif"
SYDIS

SEQ ID NO: 2218 - protein, 17 aa, Artificial Sequence
  source: /note="Description of Artificial Sequence: sequence motif"
WMNPNSGNTGYAQKFQG

SEQ ID NO: 2219 - protein, 10 aa, Artificial Sequence
  source: /note="Description of Artificial Sequence: sequence motif"
GGSSAWRTDY

SEQ ID NO: 2220 - protein, 119 aa, Artificial Sequence; identical to SEQ ID NO: 2200
  source: /note="Description of Artificial Sequence: IL-17RA binding protein"

SEQ ID NO: 2221 - protein, 5 aa, Artificial Sequence
  source: /note="Description of Artificial Sequence: sequence motif"
SYDIS

SEQ ID NO: 2222 - protein, 17 aa, Artificial Sequence
  source: /note="Description of Artificial Sequence: sequence motif"
WMNPNSGNTGYAQKFQG

SEQ ID NO: 2223 - protein, 10 aa, Artificial Sequence
  source: /note="Description of Artificial Sequence: sequence motif"
GGSSDWRTDY

SEQ ID NO: 2224 - protein, 119 aa, Artificial Sequence
  source: /note="Description of Artificial Sequence: IL-17RA binding protein"
QVQLVQSGAEVKKPGASVKVSCKASGYTFTSYDISWIRQATGQSLEWMGWMNPNSGNTGYAQKFQGRVTMTRNTSISTAYMELSSLTSEDTAVYYCARGGSSDWRTDYWGQGTLVTVSS

SEQ ID NO: 2225 - protein, 5 aa, Artificial Sequence
  source: /note="Description of Artificial Sequence: sequence motif"
SHDIS

SEQ ID NO: 2226 - protein, 17 aa, Artificial Sequence
  source: /note="Description of Artificial Sequence: sequence motif"
WMNPNSGNTGYAQKFQG

SEQ ID NO: 2227 - protein, 10 aa, Artificial Sequence
  source: /note="Description of Artificial Sequence: sequence motif"
GGSSDWRTDY

SEQ ID NO: 2228 - protein, 119 aa, Artificial Sequence
  source: /note="Description of Artificial Sequence: IL-17RA binding protein"
QVQLVQSGAEVKKPGASVKVSCKASGYTFTSHDISWIRQATGQSLEWMGWMNPNSGNTGYAQKFQGRVTMTRNTSISTAYMELSSLSSEDTAVYYCARGGSSDWRTDYWGQGTLVTVSS

SEQ ID NO: 2229 - protein, 5 aa, Artificial Sequence
  source: /note="Description of Artificial Sequence: sequence motif"
SYDIS

SEQ ID NO: 2230 - protein, 17 aa, Artificial Sequence
  source: /note="Description of Artificial Sequence: sequence motif"
WMNPNSGNTGYAQKFQG

SEQ ID NO: 2231 - protein, 10 aa, Artificial Sequence
  source: /note="Description of Artificial Sequence: sequence motif"
GDSGSWREDY

SEQ ID NO: 2232 - protein, 119 aa, Artificial Sequence
  source: /note="Description of Artificial Sequence: IL-17RA binding protein"
QVQLVQSGAEVKKPGASVKVSCKASGYTFTSYDISWVRQATGQSLEYMGWMNPNSGNTGYAQKFQGRVTMTRNTSISTAYMELSNLRSEDTAVYYCARGDSGSWREDYWGQGTLVTVSS

SEQ ID NO: 2233 - protein, 5 aa, Artificial Sequence
  source: /note="Description of Artificial Sequence: sequence motif"
SYDIS

SEQ ID NO: 2234 - protein, 17 aa, Artificial Sequence
  source: /note="Description of Artificial Sequence: sequence motif"
WMNPNSGNTGYAQKFQG

SEQ ID NO: 2235 - protein, 10 aa, Artificial Sequence
  source: /note="Description of Artificial Sequence: sequence motif"
GGITEWRRDY

SEQ ID NO: 2236 - protein, 119 aa, Artificial Sequence
  source: /note="Description of Artificial Sequence: IL-17RA binding protein"
QVQLVQSGAEVKKPGASVKVSCKASGYTFTSYDISWVRQATGQSLEYMGWMNPNSGNTGYAQKFQGRVTMTRNTSISTAYMELSSLRSEDTAVYYCARGGITEWRRDYWGQGTLVTVSS

SEQ ID NO: 2237 - protein, 5 aa, Artificial Sequence
  source: /note="Description of Artificial Sequence: sequence motif"
SYDIS

SEQ ID NO: 2238 - protein, 17 aa, Artificial Sequence
  source: /note="Description of Artificial Sequence: sequence motif"
WMNPNSGNTGYAQKFQG

SEQ ID NO: 2239 - protein, 10 aa, Artificial Sequence
  source: /note="Description of Artificial Sequence: sequence motif"
GGITEWRRDY

SEQ ID NO: 2240 - protein, 119 aa, Artificial Sequence
  source: /note="Description of Artificial Sequence: IL-17RA binding protein"
QVQLQQSGAEVKKPGASVKVSCKASGYTFTSYDISWVRQATGQSLEYMGWMNPNSGNTGYAQKFQGRVTMTRNTSISTAYMELSSLRSEDTAVYYCARGGITEWRRDYWGQGTLVTVSS

SEQ ID NO: 2241 - protein, 5 aa, Artificial Sequence
  source: /note="Description of Artificial Sequence: sequence motif"
SYDIS

SEQ ID NO: 2242 - protein, 17 aa, Artificial Sequence
  source: /note="Description of Artificial Sequence: sequence motif"
WMNPNSGNTGYAQKFQG

SEQ ID NO: 2243 - protein, 10 aa, Artificial Sequence
  source: /note="Description of Artificial Sequence: sequence motif"
GGITEWRRDY

SEQ ID NO: 2244 - protein, 119 aa, Artificial Sequence; identical to SEQ ID NO: 2236
  source: /note="Description of Artificial Sequence: IL-17RA binding protein"

SEQ ID NO: 2245 - protein, 5 aa, Artificial Sequence
  source: /note="Description of Artificial Sequence: sequence motif"
SYDIS

SEQ ID NO: 2246 - protein, 17 aa, Artificial Sequence
  source: /note="Description of Artificial Sequence: sequence motif"
WMNPNSGNTGYAQKFQG

SEQ ID NO: 2247 - protein, 10 aa, Artificial Sequence
  source: /note="Description of Artificial Sequence: sequence motif"
GGITEWRRDY

SEQ ID NO: 2248 - protein, 119 aa, Artificial Sequence; identical to SEQ ID NO: 2240
  source: /note="Description of Artificial Sequence: IL-17RA binding protein"

SEQ ID NO: 2249 - protein, 5 aa, Artificial Sequence
  source: /note="Description of Artificial Sequence: sequence motif"
SYDIS

SEQ ID NO: 2250 - protein, 17 aa, Artificial Sequence
  source: /note="Description of Artificial Sequence: sequence motif"
WMNPNSGNTGYAQKFQG

SEQ ID NO: 2251 - protein, 10 aa, Artificial Sequence
  source: /note="Description of Artificial Sequence: sequence motif"
GGITEWRRDY

SEQ ID NO: 2252 - protein, 119 aa, Artificial Sequence
  source: /note="Description of Artificial Sequence: IL-17RA binding protein"
QVQLVQSGAEVKKPGASVKVSCKASGYTFTSYDISWVRQATGQSLEYMGWMNPNSGNTGYAQKFQGRVTMTRNTSISTAYMALSSLRSEDTAVYYCARGGITEWRRDYWGQGTLVTVSS

SEQ ID NO: 2253 - protein, 5 aa, Artificial Sequence
  source: /note="Description of Artificial Sequence: sequence motif"
SYDIS

SEQ ID NO: 2254 - protein, 17 aa, Artificial Sequence
  source: /note="Description of Artificial Sequence: sequence motif"
WMNPNSGNTGYAQKFQG

SEQ ID NO: 2255 - protein, 10 aa, Artificial Sequence
  source: /note="Description of Artificial Sequence: sequence motif"
GGITEWRRDY

SEQ ID NO: 2256 - protein, 119 aa, Artificial Sequence
  source: /note="Description of Artificial Sequence: IL-17RA binding protein"
QITLKESGAEVKKPGASVKVSCKASGYTFTSYDISWVRQATGQSLEYMGWMNPNSGNTGYAQKFQGRVTMTRNTSISTAYMELSSLRSEDTAVYYCARGGITEWRRDYWGQGTLVTVSS

SEQ ID NO: 2257 - protein, 5 aa, Artificial Sequence
  source: /note="Description of Artificial Sequence: sequence motif"
SYDIS

SEQ ID NO: 2258 - protein, 17 aa, Artificial Sequence
  source: /note="Description of Artificial Sequence: sequence motif"
WMNPNSGNTGYAQKFQD

SEQ ID NO: 2259 - protein, 10 aa, Artificial Sequence
  source: /note="Description of Artificial Sequence: sequence motif"
GGYSDWRTDY

SEQ ID NO: 2260 - protein, 119 aa, Artificial Sequence
  source: /note="Description of Artificial Sequence: IL-17RA binding protein"
QVQLVQSGAEVKKPGASVRVSCKASGYTFTSYDISWVRQATGQSLEWMGWMNPNSGNTGYAQKFQDRVTMTRNTSISTAYMELSSLRSEDTAVYYCARGGYSDWRTDYWGQGTLVTVSS

SEQ ID NO: 2261 - protein, 5 aa, Artificial Sequence
  source: /note="Description of Artificial Sequence: sequence motif"
SYDIS

SEQ ID NO: 2262 - protein, 17 aa, Artificial Sequence
  source: /note="Description of Artificial Sequence: sequence motif"
WINPNSGKTVYAQKFQG

SEQ ID NO: 2263 - protein, 10 aa, Artificial Sequence
  source: /note="Description of Artificial Sequence: sequence motif"
GDSGTWREDY

SEQ ID NO: 2264 - protein, 119 aa, Artificial Sequence
  source: /note="Description of Artificial Sequence: IL-17RA binding protein"
QVQLVQSGAEVKKPGASVKVSCKASGYTFTSYDISWVRQATGQSLEYMGWINPNSGKTVYAQKFQGRVTMTRNTSISTAYMELSSLRSEDTAVYYCARGDSGTWREDYWGQGTLVTVSS

SEQ ID NO: 2265 - protein, 5 aa, Artificial Sequence
  source: /note="Description of Artificial Sequence: sequence motif"
SYDIS

SEQ ID NO: 2266 - protein, 17 aa, Artificial Sequence
  source: /note="Description of Artificial Sequence: sequence motif"
WMNPNSGKTVYAQKFQG

SEQ ID NO: 2267 - protein, 10 aa, Artificial Sequence
  source: /note="Description of Artificial Sequence: sequence motif"
GDSGTWREDY

SEQ ID NO: 2268 - protein, 119 aa, Artificial Sequence
  source: /note="Description of Artificial Sequence: IL-17RA binding protein"
QVQLVQSGAEVKNPGASVKVSCKASGYTFTSYDISWVRQATGRSLEYMGWMNPNSGKTVYAQKFQGRVTMTRNTSITTAYMELSSLRSEDTAVYYCARGDSGTWREDYWGQGTLVTVSS

SEQ ID NO: 2269 - protein, 5 aa, Artificial Sequence
  source: /note="Description of Artificial Sequence: sequence motif"
SYDIS

SEQ ID NO: 2270 - protein, 17 aa, Artificial Sequence
  source: /note="Description of Artificial Sequence: sequence motif"
WMNPNSGNTVYAQKFHG

SEQ ID NO: 2271 - protein, 10 aa, Artificial Sequence
  source: /note="Description of Artificial Sequence: sequence motif"
GDSGSWREDY

SEQ ID NO: 2272 - protein, 119 aa, Artificial Sequence
  source: /note="Description of Artificial Sequence: IL-17RA binding protein"
QVQLVQSGAEVKKPGASVKVSCKASGYTFTSYDISWVRQATGRSLEYMGWMNPNSGNTVYAQKFHGRVTMTRNTSINTAYMELSSLRSEDTAVYYCARGDSGSWREDYWGQGTLVTVSS

SEQ ID NO: 2273 - protein, 5 aa, Artificial Sequence
  source: /note="Description of Artificial Sequence: sequence motif"
SYDIS

SEQ ID NO: 2274 - protein, 17 aa, Artificial Sequence
  source: /note="Description of Artificial Sequence: sequence motif"
WMNPNSGNTGYSQKFQG

SEQ ID NO: 2275 - protein, 10 aa, Artificial Sequence
  source: /note="Description of Artificial Sequence: sequence motif"
GGEKEWRRDY

SEQ ID NO: 2276 - protein, 119 aa, Artificial Sequence
  source: /note="Description of Artificial Sequence: IL-17RA binding protein"
QVQLVQSGAEVREPGASVKVSCKASGYTFTSYDISWVRQATGQSLEWMGWMNPNSGNTGYSQKFQGRVTMTRNTSISTAYMELNSLRSEDSAVYYCARGGEKEWRRDYWGQGTLVTVSS

SEQ ID NO: 2277 - protein, 5 aa, Artificial Sequence
  source: /note="Description of Artificial Sequence: sequence motif"
SYDIS

SEQ ID NO: 2278 - protein, 17 aa, Artificial Sequence
  source: /note="Description of Artificial Sequence: sequence motif"
WMNPNSGNAGYAQKFQG

SEQ ID NO: 2279 - protein, 10 aa, Artificial Sequence
  source: /note="Description of Artificial Sequence: sequence motif"
GGFSAWRTDY

SEQ ID NO: 2280 - protein, 119 aa, Artificial Sequence
  source: /note="Description of Artificial Sequence: IL-17RA binding protein"
QVQLVQSGAEVKKPGASVKVSCKASGYSFTSYDISWVRQATGQSLEWMGWMNPNSGNAGYAQKFQGRVTMTRNTSISTAYMELRGLRSEDTAVYFCARGGFSAWRTDYWGQGTLVTVSS

SEQ ID NO: 2281 - protein, 5 aa, Artificial Sequence
  source: /note="Description of Artificial Sequence: sequence motif"
SYDIS

SEQ ID NO: 2282 - protein, 17 aa, Artificial Sequence
  source: /note="Description of Artificial Sequence: sequence motif"
WMNPNSGNAGYAQKFQG

SEQ ID NO: 2283 - protein, 10 aa, Artificial Sequence
  source: /note="Description of Artificial Sequence: sequence motif"
GGFSAWRTDY

SEQ ID NO: 2284 - protein, 119 aa, Artificial Sequence; identical to SEQ ID NO: 2280
  source: /note="Description of Artificial Sequence: IL-17RA binding protein"

SEQ ID NO: 2285 - protein, 5 aa, Artificial Sequence
  source: /note="Description of Artificial Sequence: sequence motif"
SYDIS

SEQ ID NO: 2286 - protein, 17 aa, Artificial Sequence
  source: /note="Description of Artificial Sequence: sequence motif"
WMNPNSGKTVYTQKFQG

SEQ ID NO: 2287 - protein, 10 aa, Artificial Sequence
  source: /note="Description of Artificial Sequence: sequence motif"
GDSGTWREDY

SEQ ID NO: 2288 - protein, 119 aa, Artificial Sequence
  source: /note="Description of Artificial Sequence: IL-17RA binding protein"
QVQLVQSGAEVKKPGASVKVSCKASGYTFTSYDISWIRQATGRSLEYMGWMNPNSGKTVYTQKFQGRVTMTRNTSISTAYMELSSLRSEDTAVYYCARGDSGTWREDYWGQGTLVTVSS

SEQ ID NO: 2289 - protein, 5 aa, Artificial Sequence
  source: /note="Description of Artificial Sequence: sequence motif"
SYDIS

SEQ ID NO: 2290 - protein, 17 aa, Artificial Sequence
  source: /note="Description of Artificial Sequence: sequence motif"
WMNPKSGNTGYAQKFQG

SEQ ID NO: 2291 - protein, 10 aa, Artificial Sequence
  source: /note="Description of Artificial Sequence: sequence motif"
GDFGSWREDY

SEQ ID NO: 2292 - protein, 119 aa, Artificial Sequence
  source: /note="Description of Artificial Sequence: IL-17RA binding protein"
QVQLVQSGAEVKKPGASVKVSCKASGYTFTSYDISWVRQATGQRLEWMGWMNPKSGNTGYAQKFQGRVTMTRNTSISTAYMELSSLTYEDTAVYFCARGDFGSWREDYWGQGTLVTVSS

SEQ ID NO: 2293 - protein, 5 aa, Artificial Sequence
  source: /note="Description of Artificial Sequence: sequence motif"
SYDIS

SEQ ID NO: 2294 - protein, 17 aa, Artificial Sequence
  source: /note="Description of Artificial Sequence: sequence motif"
WMNPKSGNTGYSQKFQG

SEQ ID NO: 2295 - protein, 10 aa, Artificial Sequence
  source: /note="Description of Artificial Sequence: sequence motif"
GDFGSWREDY

SEQ ID NO: 2296 - protein, 119 aa, Artificial Sequence
  source: /note="Description of Artificial Sequence: IL-17RA binding protein"
QVQLVQSGAEVKKPGASVKVSCKASGYTFTSYDISWVRQATGQRLEWMGWMNPKSGNTGYSQKFQGRVTMTRNTSISTAYMELSNLTYEDTATYFCARGDFGSWREDYWGQGTLVTVSS

SEQ ID NO: 2297 - protein, 5 aa, Artificial Sequence
  source: /note="Description of Artificial Sequence: sequence motif"
SYDIS

SEQ ID NO: 2298 - protein, 17 aa, Artificial Sequence
  source: /note="Description of Artificial Sequence: sequence motif"
WMNPKSGNTGYAQKFQG

SEQ ID NO: 2299 - protein, 10 aa, Artificial Sequence
  source: /note="Description of Artificial Sequence: sequence motif"
GDFGSWREDY

SEQ ID NO: 2300 - protein, 119 aa, Artificial Sequence
  source: /note="Description of Artificial Sequence: IL-17RA binding protein"
QVQLVQSGAEVRYPGASVKVSCKASGYTFTSYDISWVRQATGQRLEWMGWMNPKSGNTGYAQKFQGRVTMTRNTSINTAYMELNNLGYEDTAVYFCARGDFGSWREDYWGQGTLVTVSS

SEQ ID NO: 2301 - protein, 5 aa, Artificial Sequence
  source: /note="Description of Artificial Sequence: sequence motif"
SYDIS

SEQ ID NO: 2302 - protein, 17 aa, Artificial Sequence
  source: /note="Description of Artificial Sequence: sequence motif"
WMNPKSGNTGYAQKFQG

SEQ ID NO: 2303 - protein, 10 aa, Artificial Sequence
  source: /note="Description of Artificial Sequence: sequence motif"
GDFGSWREDY

SEQ ID NO: 2304 - protein, 119 aa, Artificial Sequence
  source: /note="Description of Artificial Sequence: IL-17RA binding protein"
QVQLVQSGAEVRYPGASVKVSCKASGYTFTSYDISWVRQATGQRLEWMGWMNPKSGNTGYAQKFQGRVTMTRNTSINTAYMELSNLGYEDTAVYFCARGDFGSWREDYWGQGTLVTVSS

SEQ ID NO: 2305 - protein, 5 aa, Artificial Sequence
  source: /note="Description of Artificial Sequence: sequence motif"
NYDIS

SEQ ID NO: 2306 - protein, 17 aa, Artificial Sequence
  source: /note="Description of Artificial Sequence: sequence motif"
WMNPNSGNTGYAQKFQG

SEQ ID NO: 2307 - protein, 10 aa, Artificial Sequence
  source: /note="Description of Artificial Sequence: sequence motif"
GGYSDWRTDY

SEQ ID NO: 2308 - protein, 119 aa, Artificial Sequence
  source: /note="Description of Artificial Sequence: IL-17RA binding protein"
QVQLVQSGAEVKKPGATVKVSCKASGYTFTNYDISWVRQPSGQSLEWMGWMNPNSGNTGYAQKFQGRVTMTRNTSINTAYMELSSLRSEDTAVYYCARGGYSDWRTDYWGQGTLVTVSS

SEQ ID NO: 2309 - protein, 5 aa, Artificial Sequence
  source: /note="Description of Artificial Sequence: sequence motif"
SYDIS

SEQ ID NO: 2310 - protein, 17 aa, Artificial Sequence
  source: /note="Description of Artificial Sequence: sequence motif"
WMNPNSGNTNYAQKFQG

SEQ ID NO: 2311 - protein, 10 aa, Artificial Sequence
  source: /note="Description of Artificial Sequence: sequence motif"
GNSGNWREDY

SEQ ID NO: 2312 - protein, 119 aa, Artificial Sequence
  source: /note="Description of Artificial Sequence: IL-17RA binding protein"
QVQLVQSGAEVKKPGASVKVSCKASGYTFTSYDISWIRQATGQSLEYMGWMNPNSGNTNYAQKFQGRVTMTRNISISTAYMELSSLRSDDTAVYYCARGNSGNWREDYWGQGTLVTVSS

SEQ ID NO: 2313 - protein, 5 aa, Artificial Sequence
  source: /note="Description of Artificial Sequence: sequence motif"
SYDIS

SEQ ID NO: 2314 - protein, 17 aa, Artificial Sequence
  source: /note="Description of Artificial Sequence: sequence motif"
WMNPNSGNTNYAQKFQG

SEQ ID NO: 2315 - protein, 10 aa, Artificial Sequence
  source: /note="Description of Artificial Sequence: sequence motif"
GNSGNWREDY

SEQ ID NO: 2316 - protein, 119 aa, Artificial Sequence; identical to SEQ ID NO: 2312
  source: /note="Description of Artificial Sequence: IL-17RA binding protein"

SEQ ID NO: 2317 - protein, 5 aa, Artificial Sequence
  source: /note="Description of Artificial Sequence: sequence motif"
SYDIS

SEQ ID NO: 2318 - protein, 17 aa, Artificial Sequence
  source: /note="Description of Artificial Sequence: sequence motif"
WMNPDSGNTGYSQKFQG

SEQ ID NO: 2319 - protein, 10 aa, Artificial Sequence
  source: /note="Description of Artificial Sequence: sequence motif"
GGEKEWRRDY

SEQ ID NO: 2320 - protein, 119 aa, Artificial Sequence
  source: /note="Description of Artificial Sequence: IL-17RA binding protein"
QVQLVQSGAEVKKPGASVKVSCKASGYTFTSYDISWVRQATGQSLEWMGWMNPDSGNTGYSQKFQGRVTMTRNTSISTAYMELSSLTSEDTAVYFCARGGEKEWRRDYWGQGTLVTVSS

SEQ ID NO: 2321 - protein, 5 aa, Artificial Sequence
  source: /note="Description of Artificial Sequence: sequence motif"
GYDIS

SEQ ID NO: 2322 - protein, 17 aa, Artificial Sequence
  source: /note="Description of Artificial Sequence: sequence motif"
WMNPNNGNTGYSQKFQG

SEQ ID NO: 2323 - protein, 10 aa, Artificial Sequence
  source: /note="Description of Artificial Sequence: sequence motif"
GGEKEWRRDY

SEQ ID NO: 2324 - protein, 119 aa, Artificial Sequence
  source: /note="Description of Artificial Sequence: IL-17RA binding protein"
QVQLVQSGAEVKKPGASVKVSCKASGYTFTGYDISWVRQATGQSLEWMGWMNPNNGNTGYSQKFQGRVTMTRNISISTAYMELSSLTSDDTAVYYCARGGEKEWRRDYWGQGTLVTVSS

SEQ ID NO: 2325 - protein, 5 aa, Artificial Sequence
  source: /note="Description of Artificial Sequence: sequence motif"
SYIIS

SEQ ID NO: 2326 - protein, 17 aa, Artificial Sequence
  source: /note="Description of Artificial Sequence: sequence motif"
WMNPENGNTDYTQKFQG

SEQ ID NO: 2327 - protein, 10 aa, Artificial Sequence
  source: /note="Description of Artificial Sequence: sequence motif"
GGSSAWRTDY

SEQ ID NO: 2328 - protein, 119 aa, Artificial Sequence
  source: /note="Description of Artificial Sequence: IL-17RA binding protein"
QVQLVQSGAEVRKPGASVKVSCKASGYTFTSYIISWVRQATGQSLEYMGWMNPENGNTDYTQKFQGRITMTMDPSLNTAYMELGSLKSEDTAVYYCARGGSSAWRTDYWGQGTLVTVSS

SEQ ID NO: 2329 - protein, 5 aa, Artificial Sequence
  source: /note="Description of Artificial Sequence: sequence motif"
SYVIS

SEQ ID NO: 2330 - protein, 17 aa, Artificial Sequence
  source: /note="Description of Artificial Sequence: sequence motif"
WMNPKSGNTDYTQKFQG

SEQ ID NO: 2331 - protein, 10 aa, Artificial Sequence
  source: /note="Description of Artificial Sequence: sequence motif"
GGSSAWRTDY

SEQ ID NO: 2332 - protein, 119 aa, Artificial Sequence
  source: /note="Description of Artificial Sequence: IL-17RA binding protein"
QVQLVQSGAEVRKPGASVKVSCKASGYTFTSYVISWVRQATGQSLEYMGWMNPKSGNTDYTQKFQGRITMTMDPSINTAYMELSSLRSEDTAVYYCARGGSSAWRTDYWGQGTLVTVSS

SEQ ID NO: 2333 - protein, 5 aa, Artificial Sequence
  source: /note="Description of Artificial Sequence: sequence motif"
NYNIS

SEQ ID NO: 2334 - protein, 17 aa, Artificial Sequence
  source: /note="Description of Artificial Sequence: sequence motif"
WMNPDNGNTGYSQKFQG

SEQ ID NO: 2335 - protein, 10 aa, Artificial Sequence
  source: /note="Description of Artificial Sequence: sequence motif"
GGEKEWRRDY

SEQ ID NO: 2336 - protein, 119 aa, Artificial Sequence
  source: /note="Description of Artificial Sequence: IL-17RA binding protein"
QVQLVQSGAEVKMPGASVKVSCKASGYTFTNYNISWVRQPTGQSLEWMGWMNPDNGNTGYSQKFQGRVTMTRNTSISTAYMELSSLRSDDTAVYFCARGGEKEWRRDYWGQGTLVTVSS

SEQ ID NO: 2337 - protein, 5 aa, Artificial Sequence
  source: /note="Description of Artificial Sequence: sequence motif"
SYDIS

SEQ ID NO: 2338 - protein, 17 aa, Artificial Sequence
  source: /note="Description of Artificial Sequence: sequence motif"
WMNPNSGNTGYAQKFQD

SEQ ID NO: 2339 - protein, 10 aa, Artificial Sequence
  source: /note="Description of Artificial Sequence: sequence motif"
GGYSDWRTDY

SEQ ID NO: 2340 - protein, 119 aa, Artificial Sequence; identical to SEQ ID NO: 2260
  source: /note="Description of Artificial Sequence: IL-17RA binding protein"

SEQ ID NO: 2341 - protein, 5 aa, Artificial Sequence
  source: /note="Description of Artificial Sequence: sequence motif"
NYDIS

SEQ ID NO: 2342 - protein, 17 aa, Artificial Sequence
  source: /note="Description of Artificial Sequence: sequence motif"
WMNPNSGNTGYAQKFQG

SEQ ID NO: 2343 - protein, 10 aa, Artificial Sequence
  source: /note="Description of Artificial Sequence: sequence motif"
GGYSDWRTDY

SEQ ID NO: 2344 - protein, 119 aa, Artificial Sequence; identical to SEQ ID NO: 2308
  source: /note="Description of Artificial Sequence: IL-17RA binding protein"

SEQ ID NO: 2345 - protein, 5 aa, Artificial Sequence
  source: /note="Description of Artificial Sequence: sequence motif"
SYDIS

SEQ ID NO: 2346 - protein, 17 aa, Artificial Sequence
  source: /note="Description of Artificial Sequence: sequence motif"
WMNPNSGNTGYAQKFQG

SEQ ID NO: 2347 - protein, 10 aa, Artificial Sequence
  source: /note="Description of Artificial Sequence: sequence motif"
GGITEWRRDY

SEQ ID NO: 2348 - protein, 119 aa, Artificial Sequence; identical to SEQ ID NO: 2240
  source: /note="Description of Artificial Sequence: IL-17RA binding protein"

SEQ ID NO: 2349 - protein, 5 aa, Artificial Sequence
  source: /note="Description of Artificial Sequence: sequence motif"
SYDIS

SEQ ID NO: 2350 - protein, 17 aa, Artificial Sequence
  source: /note="Description of Artificial Sequence: sequence motif"
WMNPNSGNTGYAQKFQG

SEQ ID NO: 2351 - protein, 10 aa, Artificial Sequence
  source: /note="Description of Artificial Sequence: sequence motif"
GGSSAWRTDY

SEQ ID NO: 2352 - protein, 119 aa, Artificial Sequence; identical to SEQ ID NO: 2200
  source: /note="Description of Artificial Sequence: IL-17RA binding protein"

SEQ ID NO: 2353 - protein, 5 aa, Artificial Sequence
  source: /note="Description of Artificial Sequence: sequence motif"
SYDIS

SEQ ID NO: 2354 - protein, 17 aa, Artificial Sequence
  source: /note="Description of Artificial Sequence: sequence motif"
WMNPNSGNTGYAQKFQG

SEQ ID NO: 2355 - protein, 10 aa, Artificial Sequence
  source: /note="Description of Artificial Sequence: sequence motif"
GGSSAWRTDY

SEQ ID NO: 2356 - protein, 119 aa, Artificial Sequence; identical to SEQ ID NO: 2200
  source: /note="Description of Artificial Sequence: IL-17RA binding protein"

SEQ ID NO: 2357 - protein, 5 aa, Artificial Sequence
  source: /note="Description of Artificial Sequence: sequence motif"
SYDIS

SEQ ID NO: 2358 - protein, 17 aa, Artificial Sequence
  source: /note="Description of Artificial Sequence: sequence motif"
WMNPNSGNTGYAQKFQG

SEQ ID NO: 2359 - protein, 10 aa, Artificial Sequence
  source: /note="Description of Artificial Sequence: sequence motif"
GGSSAWRTDY

SEQ ID NO: 2360 - protein, 119 aa, Artificial Sequence; identical to SEQ ID NO: 2200
  source: /note="Description of Artificial Sequence: IL-17RA binding protein"

SEQ ID NO: 2361 - protein, 5 aa, Artificial Sequence
  source: /note="Description of Artificial Sequence: sequence motif"
SYDIS

SEQ ID NO: 2362 - protein, 17 aa, Artificial Sequence
  source: /note="Description of Artificial Sequence: sequence motif"
WMNPNSGNTGYAQKFQG

SEQ ID NO: 2363 - protein, 10 aa, Artificial Sequence
  source: /note="Description of Artificial Sequence: sequence motif"
GGSSAWRTDY

SEQ ID NO: 2364 - protein, 119 aa, Artificial Sequence; identical to SEQ ID NO: 2200
  source: /note="Description of Artificial Sequence: IL-17RA binding protein"

SEQ ID NO: 2365 - protein, 5 aa, Artificial Sequence
  source: /note="Description of Artificial Sequence: sequence motif"
SYDIS

SEQ ID NO: 2366 - protein, 17 aa, Artificial Sequence
  source: /note="Description of Artificial Sequence: sequence motif"
WMNPNSGNTGYAQKFQD

SEQ ID NO: 2367 - protein, 10 aa, Artificial Sequence
  source: /note="Description of Artificial Sequence: sequence motif"
GGSSDWRTDY

SEQ ID NO: 2368 - protein, 119 aa, Artificial Sequence
  source: /note="Description of Artificial Sequence: IL-17RA binding protein"
QVQLVQSGAEVKKPGASVRVSCKASGYTFTSYDISWVRQATGQGLEYMGWMNPNSGNTGYAQKFQDRVTMTRNTSISTAYMELSSLRSEDTAVYYCARGGSSDWRTDYWGQGTLVTVSS

SEQ ID NO: 2369 - protein, 5 aa, Artificial Sequence
  source: /note="Description of Artificial Sequence: sequence motif"
SYDIS

SEQ ID NO: 2370 - protein, 17 aa, Artificial Sequence
  source: /note="Description of Artificial Sequence: sequence motif"
WMNPNSGNTGYAQKFQD

SEQ ID NO: 2371 - protein, 10 aa, Artificial Sequence
  source: /note="Description of Artificial Sequence: sequence motif"
GGSSDWRTDY

SEQ ID NO: 2372 - protein, 119 aa, Artificial Sequence; identical to SEQ ID NO: 2368
  source: /note="Description of Artificial Sequence: IL-17RA binding protein"

SEQ ID NO: 2373 - protein, 5 aa, Artificial Sequence
  source: /note="Description of Artificial Sequence: sequence motif"
SYDIS

SEQ ID NO: 2374 - protein, 17 aa, Artificial Sequence
  source: /note="Description of Artificial Sequence: sequence motif"
WMNPNSGNTGYAQKFQG

SEQ ID NO: 2375 - protein, 10 aa, Artificial Sequence
  source: /note="Description of Artificial Sequence: sequence motif"
GGSSDWRTDY

SEQ ID NO: 2376 - protein, 119 aa, Artificial Sequence; identical to SEQ ID NO: 2224
  source: /note="Description of Artificial Sequence: IL-17RA binding protein"

SEQ ID NO: 2377 - protein, 5 aa, Artificial Sequence
  source: /note="Description of Artificial Sequence: sequence motif"
SYDIS

SEQ ID NO: 2378 - protein, 17 aa, Artificial Sequence
  source: /note="Description of Artificial Sequence: sequence motif"
WMNPNSGNTGYAQKFQG

SEQ ID NO: 2379 - protein, 10 aa, Artificial Sequence
  source: /note="Description of Artificial Sequence: sequence motif"
GGSSDWRTDY

SEQ ID NO: 2380 - protein, 119 aa, Artificial Sequence; identical to SEQ ID NO: 2224
  source: /note="Description of Artificial Sequence: IL-17RA binding protein"

SEQ ID NO: 2381 - protein, 5 aa, Artificial Sequence
  source: /note="Description of Artificial Sequence: sequence motif"
SYDIS

SEQ ID NO: 2382 - protein, 17 aa, Artificial Sequence
  source: /note="Description of Artificial Sequence: sequence motif"
WMNPNSGNTGYAQKFQG

SEQ ID NO: 2383 - protein, 10 aa, Artificial Sequence
  source: /note="Description of Artificial Sequence: sequence motif"
GGSSDWRTDY

SEQ ID NO: 2384 - protein, 119 aa, Artificial Sequence; identical to SEQ ID NO: 2224
  source: /note="Description of Artificial Sequence: IL-17RA binding protein"

SEQ ID NO: 2385 - protein, 5 aa, Artificial Sequence
  source: /note="Description of Artificial Sequence: sequence motif"
SYDIS

SEQ ID NO: 2386 - protein, 17 aa, Artificial Sequence
  source: /note="Description of Artificial Sequence: sequence motif"
WMNPNSGNTGYAQKFQG

SEQ ID NO: 2387 - protein, 10 aa, Artificial Sequence
  source: /note="Description of Artificial Sequence: sequence motif"
GGSSDWRTDY

SEQ ID NO: 2388 - protein, 119 aa, Artificial Sequence; identical to SEQ ID NO: 2224
  source: /note="Description of Artificial Sequence: IL-17RA binding protein"

SEQ ID NO: 2389 - protein, 5 aa, Artificial Sequence
  source: /note="Description of Artificial Sequence: sequence motif"
SYDIS

SEQ ID NO: 2390 - protein, 17 aa, Artificial Sequence
  source: /note="Description of Artificial Sequence: sequence motif"
WMNPNSGNTGYAQKFQD

SEQ ID NO: 2391 - protein, 10 aa, Artificial Sequence
  source: /note="Description of Artificial Sequence: sequence motif"
GGYSDWRTDY

SEQ ID NO: 2392 - protein, 119 aa, Artificial Sequence; identical to SEQ ID NO: 2260
  source: /note="Description of Artificial Sequence: IL-17RA binding protein"

SEQ ID NO: 2393 - protein, 5 aa, Artificial Sequence
  source: /note="Description of Artificial Sequence: sequence motif"
SYDIS

SEQ ID NO: 2394 - protein, 17 aa, Artificial Sequence
  source: /note="Description of Artificial Sequence: sequence motif"
WMNPNSGNTGYAQKFQD

SEQ ID NO: 2395 - protein, 10 aa, Artificial Sequence
  source: /note="Description of Artificial Sequence: sequence motif"
GGYSDWRTDY

SEQ ID NO: 2396 - protein, 119 aa, Artificial Sequence; identical to SEQ ID NO: 2260
  source: /note="Description of Artificial Sequence: IL-17RA binding protein"

SEQ ID NO: 2397 - protein, 5 aa, Artificial Sequence
  source: /note="Description of Artificial Sequence: sequence motif"
SYDIS

SEQ ID NO: 2398 - protein, 17 aa, Artificial Sequence
  source: /note="Description of Artificial Sequence: sequence motif"
WMNPNSGNTGYAQKFQD

SEQ ID NO: 2399 - protein, 10 aa, Artificial Sequence
  source: /note="Description of Artificial Sequence: sequence motif"
GGYSDWRTDY

SEQ ID NO: 2400 - protein, 119 aa, Artificial Sequence; identical to SEQ ID NO: 2260
  source: /note="Description of Artificial Sequence: IL-17RA binding protein"

SEQ ID NO: 2401 - protein, 5 aa, Artificial Sequence
  source: /note="Description of Artificial Sequence: sequence motif"
NYDIS

SEQ ID NO: 2402 - protein, 17 aa, Artificial Sequence
  source: /note="Description of Artificial Sequence: sequence motif"
WMNPNSGNTGYAQKFQG

SEQ ID NO: 2403 - protein, 10 aa, Artificial Sequence
  source: /note="Description of Artificial Sequence: sequence motif"
GGYSDWRTDY

SEQ ID NO: 2404 - protein, 119 aa, Artificial Sequence; identical to SEQ ID NO: 2308
  source: /note="Description of Artificial Sequence: IL-17RA binding protein"

SEQ ID NO: 2405 - protein, 5 aa, Artificial Sequence
  source: /note="Description of Artificial Sequence: sequence motif"
NYDIS

SEQ ID NO: 2406 - protein, 17 aa, Artificial Sequence
  source: /note="Description of Artificial Sequence: sequence motif"
WMNPNSGNTGYAQKFQG

SEQ ID NO: 2407 - protein, 10 aa, Artificial Sequence
  source: /note="Description of Artificial Sequence: sequence motif"
GGYSDWRTDY

SEQ ID NO: 2408 - protein, 119 aa, Artificial Sequence; identical to SEQ ID NO: 2308
  source: /note="Description of Artificial Sequence: IL-17RA binding protein"

SEQ ID NO: 2409 - protein, 5 aa, Artificial Sequence
  source: /note="Description of Artificial Sequence: sequence motif"
SYIIS

SEQ ID NO: 2410 - protein, 17 aa, Artificial Sequence
  source: /note="Description of Artificial Sequence: sequence motif"
WMNPENGNTDYTQKFQG

SEQ ID NO: 2411 - protein, 10 aa, Artificial Sequence
  source: /note="Description of Artificial Sequence: sequence motif"
GGSSAWRTDY

SEQ ID NO: 2412 - protein, 119 aa, Artificial Sequence; identical to SEQ ID NO: 2328
  source: /note="Description of Artificial Sequence: IL-17RA binding protein"

SEQ ID NO: 2413 - protein, 5 aa, Artificial Sequence
  source: /note="Description of Artificial Sequence: sequence motif"
SYDIS

SEQ ID NO: 2414 - protein, 17 aa, Artificial Sequence
  source: /note="Description of Artificial Sequence: sequence motif"
WMNPNSGNTGYAQKFQD

SEQ ID NO: 2415 - protein, 10 aa, Artificial Sequence
  source: /note="Description of Artificial Sequence: sequence motif"
GGSSDWRTDY

SEQ ID NO: 2416 - protein, 119 aa, Artificial Sequence
  source: /note="Description of Artificial Sequence: IL-17RA binding protein"
QVQLVQSGAEVKKPGASVRVSCKASGYTFTSYDISWVRQATGQGLEYMGWMNPNSGNTGYAQKFQDRVTMTRNTSISTAYMELSSLGSEDTAVYYCARGGSSDWRTDYWGQGTLVTVSS

SEQ ID NO: 2417 - protein, 5 aa, Artificial Sequence
  source: /note="Description of Artificial Sequence: sequence motif"
SYDIS

SEQ ID NO: 2418 - protein, 17 aa, Artificial Sequence
  source: /note="Description of Artificial Sequence: sequence motif"
WMNPNSGNTGYAQKFQD

SEQ ID NO: 2419 - protein, 10 aa, Artificial Sequence
  source: /note="Description of Artificial Sequence: sequence motif"
GGSSDWRTDY

SEQ ID NO: 2420 - protein, 119 aa, Artificial Sequence; identical to SEQ ID NO: 2368
  source: /note="Description of Artificial Sequence: IL-17RA binding protein"

SEQ ID NO: 2421 - protein, 5 aa, Artificial Sequence
  source: /note="Description of Artificial Sequence: sequence motif"
SYDIS

SEQ ID NO: 2422 - protein, 17 aa, Artificial Sequence
  source: /note="Description of Artificial Sequence: sequence motif"
WMNPNSGNTGYAQKFQG

SEQ ID NO: 2423 - protein, 10 aa, Artificial Sequence
  source: /note="Description of Artificial Sequence: sequence motif"
GGSSAWRTDY

SEQ ID NO: 2424 - protein, 119 aa, Artificial Sequence
  source: /note="Description of Artificial Sequence: IL-17RA binding protein"
QVQLVQSGAEVKKPGASVKVSCKASGYTFTSYDISWVRQATGQSLEYMGWMNPNSGNTGYAQKFQGRVTMTRNTSISTAYMELSSLRSEDTAVYFCARGGSSAWRTDYWGRGTLVTVSS

SEQ ID NO: 2425 - protein, 5 aa, Artificial Sequence
  source: /note="Description of Artificial Sequence: sequence motif"
SYDIS

SEQ ID NO: 2426 - protein, 17 aa, Artificial Sequence
  source: /note="Description of Artificial Sequence: sequence motif"
WMNPNSGNTGYAQKFQG

SEQ ID NO: 2427 - protein, 10 aa, Artificial Sequence
  source: /note="Description of Artificial Sequence: sequence motif"
GGSSDWRTDY

SEQ ID NO: 2428 - protein, 119 aa, Artificial Sequence
  source: /note="Description of Artificial Sequence: IL-17RA binding protein"
QVQLVQSGAEVKKPGASVKVSCKASGYAFTSYDISWIRQATGQSLEWMGWMNPNSGNTGYAQKFQGRVTMTRNTSISTAYMELSSLTSEDTAVYYCARGGSSDWRTDYWGQGTLVTVSS

SEQ ID NO: 2429 - protein, 5 aa, Artificial Sequence
  source: /note="Description of Artificial Sequence: sequence motif"
SHDIS

SEQ ID NO: 2430 - protein, 17 aa, Artificial Sequence
  source: /note="Description of Artificial Sequence: sequence motif"
WMNPNSGNTGYAQKFQG

SEQ ID NO: 2431 - protein, 10 aa, Artificial Sequence
  source: /note="Description of Artificial Sequence: sequence motif"
GGSSDWRTDY

SEQ ID NO: 2432 - protein, 119 aa, Artificial Sequence
  source: /note="Description of Artificial Sequence: IL-17RA binding protein"
QVQLVQSGAEVKKPGASVKVSCKASGYTFTSHDISWIRQATGQSLEWMGWMNPNSGNTGYAQKFQGRVTMTRNTSISTAYMELSSLTSEDTAVYYCARGGSSDWRTDYWGQGTLVTVSS

SEQ ID NO: 2433 - protein, 5 aa, Artificial Sequence
  source: /note="Description of Artificial Sequence: sequence motif"
SYDIS

SEQ ID NO: 2434 - protein, 17 aa, Artificial Sequence
  source: /note="Description of Artificial Sequence: sequence motif"
WMNPNSGNTGYAQKFQG

SEQ ID NO: 2435 - protein, 10 aa, Artificial Sequence
  source: /note="Description of Artificial Sequence: sequence motif"
GGSSDWRTDY

SEQ ID NO: 2436 - protein, 119 aa, Artificial Sequence; identical to SEQ ID NO: 2224
  source: /note="Description of Artificial Sequence: IL-17RA binding protein"

SEQ ID NO: 2437 - protein, 5 aa, Artificial Sequence
  source: /note="Description of Artificial Sequence: sequence motif"
NYDIS

SEQ ID NO: 2438 - protein, 17 aa, Artificial Sequence
  source: /note="Description of Artificial Sequence: sequence motif"
WMNPNSGNTGYAQKFQG

SEQ ID NO: 2439 - protein, 10 aa, Artificial Sequence
  source: /note="Description of Artificial Sequence: sequence motif"
GGYSDWRTDY

SEQ ID NO: 2440 - protein, 119 aa, Artificial Sequence
  source: /note="Description of Artificial Sequence: IL-17RA binding protein"
QVQLVQSGAEVKKPGASVKVSCKASGYTFTNYDISWVRQPSGQSLEWMGWMNPNSGNTGYAQKFQGRVTMTRNTSINTAYMELSSLRSEDTAVYYCARGGYSDWRTDYWGQGTLVTVSS

SEQ ID NO: 2441 - protein, 5 aa, Artificial Sequence
  source: /note="Description of Artificial Sequence: sequence motif"
NYDIS

SEQ ID NO: 2442 - protein, 17 aa, Artificial Sequence
  source: /note="Description of Artificial Sequence: sequence motif"
WMNPNSGNTGYAQKFQG

SEQ ID NO: 2443 - protein, 10 aa, Artificial Sequence
  source: /note="Description of Artificial Sequence: sequence motif"
GGYSDWRTDY

SEQ ID NO: 2444 - protein, 119 aa, Artificial Sequence
  source: /note="Description of Artificial Sequence: IL-17RA binding protein"
QVQLVQSGAEVKKPGATVKVSCKASGYTFTNYDISWVRQPSGQSLEWMGWMNPNSGNTGYAQKFQGRVTMTRDTSINTAYMELSSLRSEDTAVYYCARGGYSDWRTDYWGQGTLVTVSS

SEQ ID NO: 2445 - protein, 5 aa, Artificial Sequence
  source: /note="Description of Artificial Sequence: sequence motif"
SYVIS

SEQ ID NO: 2446 - protein, 17 aa, Artificial Sequence
  source: /note="Description of Artificial Sequence: sequence motif"
WMNPKSGNTDYVQKFQG

SEQ ID NO: 2447 - protein, 10 aa, Artificial Sequence
  source: /note="Description of Artificial Sequence: sequence motif"
GGSSAWRTDY

SEQ ID NO: 2448 - protein, 119 aa, Artificial Sequence
  source: /note="Description of Artificial Sequence: IL-17RA binding protein"
QVQLVQSGAEVRKPGASVKVSCKASGYTFTSYVISWVRQATGQSLEYMGWMNPKSGNTDYVQKFQGRITMTMDPSISTAYMELSSLRSEDTAVYYCARGGSSAWRTDYWGQGTLVTVSS

SEQ ID NO: 2449 - protein, 5 aa, Artificial Sequence
  source: /note="Description of Artificial Sequence: sequence motif"
SYVIS

SEQ ID NO: 2450 - protein, 17 aa, Artificial Sequence
  source: /note="Description of Artificial Sequence: sequence motif"
WMNPKSGNTDYAQKFQG

SEQ ID NO: 2451 - protein, 10 aa, Artificial Sequence
  source: /note="Description of Artificial Sequence: sequence motif"
GGSSAWRTDY

SEQ ID NO: 2452 - protein, 119 aa, Artificial Sequence
  source: /note="Description of Artificial Sequence: IL-17RA binding protein"
QVQLVQSGAEVRKPGASVKVSCKASGYTFTSYVISWVRQATGQSLEYMGWMNPKSGNTDYAQKFQGRITMTMDPSISTAYMELSSLRSEDTAVYYCARGGSSAWRTDYWGQGTLVTVSS

SEQ ID NO: 2453 - protein, 5 aa, Artificial Sequence
  source: /note="Description of Artificial Sequence: sequence motif"
SYVIS

SEQ ID NO: 2454 - protein, 17 aa, Artificial Sequence
  source: /note="Description of Artificial Sequence: sequence motif"
WMNPKSGNTDYTQKFQG

SEQ ID NO: 2455 - protein, 10 aa, Artificial Sequence
  source: /note="Description of Artificial Sequence: sequence motif"
GGSSAWRTDY

SEQ ID NO: 2456 - protein, 119 aa, Artificial Sequence
  source: /note="Description of Artificial Sequence: IL-17RA binding protein"
QVQLVQSGAEVRKPGASVKVSCKASGYTFTSYVISWVRQATGQSLEYMGWMNPKSGNTDYTQKFQGRITMTMDPSISTAYMELSSLRSEDTAVYYCARGGSSAWRTDYWGQGTLVTVSS

SEQ ID NO: 2457 - protein, 5 aa, Artificial Sequence
  source: /note="Description of Artificial Sequence: sequence motif"
NYDIS

SEQ ID NO: 2458 - protein, 17 aa, Artificial Sequence
  source: /note="Description of Artificial Sequence: sequence motif"
WMNPNSGNTGYAQKFQG

SEQ ID NO: 2459 - protein, 10 aa, Artificial Sequence
  source: /note="Description of Artificial Sequence: sequence motif"
GGSSDWRTDY

SEQ ID NO: 2460 - protein, 119 aa, Artificial Sequence
  source: /note="Description of Artificial Sequence: IL-17RA binding protein"
QVQLVQSGAEVKKPGASVKVSCKASGYTFTNYDISWVRQATGQGLEWMGWMNPNSGNTGYAQKFQGRVTMTRNTSISTAYMELSSLRSEDTAVYYCARGGSSDWRTDYWGQGTLVTVSS

SEQ ID NO: 2461 - protein, 5 aa, Artificial Sequence
  source: /note="Description of Artificial Sequence: sequence motif"
SYDIS

SEQ ID NO: 2462 - protein, 17 aa, Artificial Sequence
  source: /note="Description of Artificial Sequence: sequence motif"
WMNPNSGNTGYAQKFQD

SEQ ID NO: 2463 - protein, 10 aa, Artificial Sequence
  source: /note="Description of Artificial Sequence: sequence motif"
GGSSDWRTDY

SEQ ID NO: 2464 - protein, 119 aa, Artificial Sequence
  source: /note="Description of Artificial Sequence: IL-17RA binding protein"
QVQLVQSGAEAKKPGASVKVSCKASGYTFTSYDISWVRQATGQGLEYMGWMNPNSGNTGYAQKFQDRVTMTRNTSISTAYMELSSLRSEDTAVYYCARGGSSDWRTDYWGQGTLVTVSS

SEQ ID NO: 2465 - protein, 5 aa, Artificial Sequence
  source: /note="Description of Artificial Sequence: sequence motif"
NYDIS

SEQ ID NO: 2466 - protein, 17 aa, Artificial Sequence
  source: /note="Description of Artificial Sequence: sequence motif"
WMNPDSGNTGYAQKFQG

SEQ ID NO: 2467 - protein, 10 aa, Artificial Sequence
  source: /note="Description of Artificial Sequence: sequence motif"
GGYNAWRTDY

SEQ ID NO: 2468 - protein, 119 aa, Artificial Sequence
  source: /note="Description of Artificial Sequence: IL-17RA binding protein"
QVQLVQSGAEVKKPGASVKVSCKASGYTFTNYDISWIRQATGQSLEWMGWMNPDSGNTGYAQKFQGRVTMTRNTSISTAYMELSGLRSEDTAVYFCARGGYNAWRTDYWGQGTLVTVSS

SEQ ID NO: 2469 - protein, 5 aa, Artificial Sequence
  source: /note="Description of Artificial Sequence: sequence motif"
NYDIS

SEQ ID NO: 2470 - protein, 17 aa, Artificial Sequence
  source: /note="Description of Artificial Sequence: sequence motif"
WMNPDSGNTGYAQKFQG

SEQ ID NO: 2471 - protein, 10 aa, Artificial Sequence
  source: /note="Description of Artificial Sequence: sequence motif"
GGYNAWRTDY

SEQ ID NO: 2472 - protein, 119 aa, Artificial Sequence; identical to SEQ ID NO: 2468
  source: /note="Description of Artificial Sequence: IL-17RA binding protein"

SEQ ID NO: 2473 - protein, 5 aa, Artificial Sequence
  source: /note="Description of Artificial Sequence: sequence motif"
NYDIS

SEQ ID NO: 2474 - protein, 17 aa, Artificial Sequence
  source: /note="Description of Artificial Sequence: sequence motif"
WMNPDSGNTGYAQKFQG

SEQ ID NO: 2475 - protein, 10 aa, Artificial Sequence
  source: /note="Description of Artificial Sequence: sequence motif"
GGYNAWRTDY

SEQ ID NO: 2476 - protein, 119 aa, Artificial Sequence; identical to SEQ ID NO: 2468
  source: /note="Description of Artificial Sequence: IL-17RA binding protein"

SEQ ID NO: 2477 - protein, 5 aa, Artificial Sequence
  source: /note="Description of Artificial Sequence: sequence motif"
NYDIS

SEQ ID NO: 2478 - protein, 17 aa, Artificial Sequence
  source: /note="Description of Artificial Sequence: sequence motif"
WMNPASGNTGYAQKFQG

SEQ ID NO: 2479 - protein, 10 aa, Artificial Sequence
  source: /note="Description of Artificial Sequence: sequence motif"
GGYNAWRTDY

SEQ ID NO: 2480 - protein, 119 aa, Artificial Sequence
  source: /note="Description of Artificial Sequence: IL-17RA binding protein"
QVQLVQSGAEVKKPGASVKVSCKASGYTFTNYDISWVRQATGQSLEWMGWMNPASGNTGYAQKFQGRVTMTRNTSISTAYMELSGLRSEDTAVYFCARGGYNAWRTDYWGQGTLVTVSS

SEQ ID NO: 2481 - protein, 5 aa, Artificial Sequence
  source: /note="Description of Artificial Sequence: sequence motif"
NYDIS

SEQ ID NO: 2482 - protein, 17 aa, Artificial Sequence
  source: /note="Description of Artificial Sequence: sequence motif"
WMNPDSGNTGYAQKFQG

SEQ ID NO: 2483 - protein, 10 aa, Artificial Sequence
  source: /note="Description of Artificial Sequence: sequence motif"
GGYNAWRTDY

SEQ ID NO: 2484 - protein, 119 aa, Artificial Sequence
  source: /note="Description of Artificial Sequence: IL-17RA binding protein"
QVQLVQSGAEVKKPGASVKVSCKATGYTFTNYDISWVRQATGQSLEWMGWMNPDSGNTGYAQKFQGRVTMTRNTSISTAYMELSGLRSEDTAVYFCARGGYNAWRTDYWGQGTLVTVSS

SEQ ID NO: 2485 - protein, 5 aa, Artificial Sequence
  source: /note="Description of Artificial Sequence: sequence motif"
NYDIS

SEQ ID NO: 2486 - protein, 17 aa, Artificial Sequence
  source: /note="Description of Artificial Sequence: sequence motif"
WMNPDSGNTGYAQKFQG

SEQ ID NO: 2487 - protein, 10 aa, Artificial Sequence
  source: /note="Description of Artificial Sequence: sequence motif"
GGYNAWRTDY

SEQ ID NO: 2488 - protein, 119 aa, Artificial Sequence
  source: /note="Description of Artificial Sequence: IL-17RA binding protein"
QVQLVQSGAEVKKPGASVKVSCKASGYTFTNYDISWVRQATGQSLEWMGWMNPDSGNTGYAQKFQGRVTMTRNTSISTAYMELSDLRSEDTAVYFCARGGYNAWRTDYWGQGTLVTVSS

SEQ ID NO: 2489 - protein, 5 aa, Artificial Sequence
  source: /note="Description of Artificial Sequence: sequence motif"
SYDIS

SEQ ID NO: 2490 - protein, 17 aa, Artificial Sequence
  source: /note="Description of Artificial Sequence: sequence motif"
WMNPNSGNTGYAQKFQG

SEQ ID NO: 2491 - protein, 10 aa, Artificial Sequence
  source: /note="Description of Artificial Sequence: sequence motif"
GNSSGWRTDY

SEQ ID NO: 2492 - protein, 119 aa, Artificial Sequence
  source: /note="Description of Artificial Sequence: IL-17RA binding protein"
QVQLVQSGAEVKKPGASVKVSCKASGYTFTSYDISWIRQATGQSLEWMGWMNPNSGNTGYAQKFQGRVTMTRNTSISTAYMELSSLTSEDTAVYYCARGNSSGWRTDYWGQGTLVTVSS

SEQ ID NO: 2493 - protein, 5 aa, Artificial Sequence
  source: /note="Description of Artificial Sequence: sequence motif"
SYDIS

SEQ ID NO: 2494 - protein, 17 aa, Artificial Sequence
  source: /note="Description of Artificial Sequence: sequence motif"
WMNPNSGNTGYAQKFQG

SEQ ID NO: 2495 - protein, 10 aa, Artificial Sequence
  source: /note="Description of Artificial Sequence: sequence motif"
GGYSDWRTDY

SEQ ID NO: 2496 - protein, 119 aa, Artificial Sequence
  source: /note="Description of Artificial Sequence: IL-17RA binding protein"
QVQLVQSGAEVKKPGATVKVSCKASGYTFTSYDISWVRQATGQRLEWMGWMNPNSGNTGYAQKFQGRVTMTRNTSINTAYMELSSLRSEDTAVYYCARGGYSDWRTDYWGQGTLVTVSS

SEQ ID NO: 2497 - protein, 5 aa, Artificial Sequence
  source: /note="Description of Artificial Sequence: sequence motif"
SYDIS

SEQ ID NO: 2498 - protein, 17 aa, Artificial Sequence
  source: /note="Description of Artificial Sequence: sequence motif"
WMNPNSGNTGYAQKFQG

SEQ ID NO: 2499 - protein, 10 aa, Artificial Sequence
  source: /note="Description of Artificial Sequence: sequence motif"
GGYSDWRTDY

SEQ ID NO: 2500 - protein, 119 aa, Artificial Sequence; identical to SEQ ID NO: 2496
  source: /note="Description of Artificial Sequence: IL-17RA binding protein"

SEQ ID NO: 2501 - protein, 5 aa, Artificial Sequence
  source: /note="Description of Artificial Sequence: sequence motif"
SYDIS

SEQ ID NO: 2502 - protein, 17 aa, Artificial Sequence
  source: /note="Description of Artificial Sequence: sequence motif"
WMNPNSGNTGYAQKFQG

SEQ ID NO: 2503 - protein, 10 aa, Artificial Sequence
  source: /note="Description of Artificial Sequence: sequence motif"
GGYSDWRTDY

SEQ ID NO: 2504 - protein, 119 aa, Artificial Sequence; identical to SEQ ID NO: 2496
  source: /note="Description of Artificial Sequence: IL-17RA binding protein"

SEQ ID NO: 2505 - protein, 5 aa, Artificial Sequence
  source: /note="Description of Artificial Sequence: sequence motif"
SYDIS

SEQ ID NO: 2506 - protein, 17 aa, Artificial Sequence
  source: /note="Description of Artificial Sequence: sequence motif"
WMNPNSGNTGYAQKFQG

SEQ ID NO: 2507 - protein, 10 aa, Artificial Sequence
  source: /note="Description of Artificial Sequence: sequence motif"
GGYSDWRTDY

SEQ ID NO: 2508 - protein, 119 aa, Artificial Sequence; identical to SEQ ID NO: 2496
  source: /note="Description of Artificial Sequence: IL-17RA binding protein"

SEQ ID NO: 2509 - protein, 5 aa, Artificial Sequence
  source: /note="Description of Artificial Sequence: sequence motif"
SYDIS

SEQ ID NO: 2510 - protein, 17 aa, Artificial Sequence
  source: /note="Description of Artificial Sequence: sequence motif"
WMNPNSGNTGYAQKFQG

SEQ ID NO: 2511 - protein, 10 aa, Artificial Sequence
  source: /note="Description of Artificial Sequence: sequence motif"
GGYSDWRTDY

SEQ ID NO: 2512 - protein, 119 aa, Artificial Sequence
  source: /note="Description of Artificial Sequence: IL-17RA binding protein"
QVQLVQSGAEVKKPGATVKVSCKASGYTFTSYDISWVRQATGQSLEWMGWMNPNSGNTGYAQKFQGRVTMTRNTSINTAYMELSSLRSEDTAVYYCARGGYSDWRTDYWGQGTLVTVSS

SEQ ID NO: 2513 - protein, 5 aa, Artificial Sequence
  source: /note="Description of Artificial Sequence: sequence motif"
SYDIS

SEQ ID NO: 2514 - protein, 17 aa, Artificial Sequence
  source: /note="Description of Artificial Sequence: sequence motif"
WMNPKSGNTGYVQKFQG

SEQ ID NO: 2515 - protein, 10 aa, Artificial Sequence
  source: /note="Description of Artificial Sequence: sequence motif"
GGSSDWRTDY

SEQ ID NO: 2516 - protein, 119 aa, Artificial Sequence
  source: /note="Description of Artificial Sequence: IL-17RA binding protein"
QVQLVQSGAEVKKPGASVKVSCKASGYTFTSYDISWVRQATGQGLEYMGWMNPKSGNTGYVQKFQGRVTMTRNTSINTAYMELSSLRSEDTAVYYCARGGSSDWRTDYWGQGTLVTVSS

SEQ ID NO: 2517 - protein, 5 aa, Artificial Sequence
  source: /note="Description of Artificial Sequence: sequence motif"
SYDIS

SEQ ID NO: 2518 - protein, 17 aa, Artificial Sequence
  source: /note="Description of Artificial Sequence: sequence motif"
WMNPKSGNTGYVQKFQG

SEQ ID NO: 2519 - protein, 10 aa, Artificial Sequence
  source: /note="Description of Artificial Sequence: sequence motif"
GGSSDWRTDY

SEQ ID NO: 2520 - protein, 119 aa, Artificial Sequence; identical to SEQ ID NO: 2516
  source: /note="Description of Artificial Sequence: IL-17RA binding protein"

SEQ ID NO: 2521 - protein, 5 aa, Artificial Sequence
  source: /note="Description of Artificial Sequence: sequence motif"
NYDIS

SEQ ID NO: 2522 - protein, 17 aa, Artificial Sequence
  source: /note="Description of Artificial Sequence: sequence motif"
WMNPDTGNTGYAQKFQG

SEQ ID NO: 2523 - protein, 10 aa, Artificial Sequence
  source: /note="Description of Artificial Sequence: sequence motif"
GGYNAWRTDY

SEQ ID NO: 2524 - protein, 119 aa, Artificial Sequence
  source: /note="Description of Artificial Sequence: IL-17RA binding protein"
QVQLVQSGAEVKKPGASVKVSCKASGYTFTNYDISWVRQATGQSLEWMGWMNPDTGNTGYAQKFQGRVTMTRNTSINTAYMELSGLRSEDTAVYFCARGGYNAWRTDYWGQGTLVTVSS

SEQ ID NO: 2525 - protein, 5 aa, Artificial Sequence
  source: /note="Description of Artificial Sequence: sequence motif"
NYDIS

SEQ ID NO: 2526 - protein, 17 aa, Artificial Sequence
  source: /note="Description of Artificial Sequence: sequence motif"
WMNPDTGNTGYAQKFQG

SEQ ID NO: 2527 - protein, 10 aa, Artificial Sequence
  source: /note="Description of Artificial Sequence: sequence motif"
GGYNAWRTDY

SEQ ID NO: 2528 - protein, 119 aa, Artificial Sequence; identical to SEQ ID NO: 2524
  source: /note="Description of Artificial Sequence: IL-17RA binding protein"

SEQ ID NO: 2529 - protein, 5 aa, Artificial Sequence
  source: /note="Description of Artificial Sequence: sequence motif"
NYDIS

SEQ ID NO: 2530 - protein, 17 aa, Artificial Sequence
  source: /note="Description of Artificial Sequence: sequence motif"
WINPDSGNTGYAQKFQG

SEQ ID NO: 2531 - protein, 10 aa, Artificial Sequence
  source: /note="Description of Artificial Sequence: sequence motif"
GGYHAWRTDY

SEQ ID NO: 2532 - protein, 119 aa, Artificial Sequence
  source: /note="Description of Artificial Sequence: IL-17RA binding protein"
QVQLVQSGAEVKKPGASVKVSCKASGYTFTNYDISWVRQATGQSLEWMGWINPDSGNTGYAQKFQGRVTMTRNTSINTAYMELSGLRSEDTAVYFCARGGYHAWRTDYWGQGTLVTVSS

SEQ ID NO: 2533 - protein, 5 aa, Artificial Sequence
  source: /note="Description of Artificial Sequence: sequence motif"
NYDIS

SEQ ID NO: 2534 - protein, 17 aa, Artificial Sequence
  source: /note="Description of Artificial Sequence: sequence motif"
WINPDSGNTGYAQKFQG

SEQ ID NO: 2535 - protein, 10 aa, Artificial Sequence
  source: /note="Description of Artificial Sequence: sequence motif"
GGYHAWRTDY

SEQ ID NO: 2536 - protein, 119 aa, Artificial Sequence; identical to SEQ ID NO: 2532
  source: /note="Description of Artificial Sequence: IL-17RA binding protein"

SEQ ID NO: 2537 - protein, 5 aa, Artificial Sequence
  source: /note="Description of Artificial Sequence: sequence motif"
NYDIS

SEQ ID NO: 2538 - protein, 17 aa, Artificial Sequence
  source: /note="Description of Artificial Sequence: sequence motif"
WINPDSGNTGYAQKFQG

SEQ ID NO: 2539 - protein, 10 aa, Artificial Sequence
  source: /note="Description of Artificial Sequence: sequence motif"
GGYHAWRTDY

SEQ ID NO: 2540 - protein, 119 aa, Artificial Sequence; identical to SEQ ID NO: 2532
  source: /note="Description of Artificial Sequence: IL-17RA binding protein"

SEQ ID NO: 2541 - protein, 5 aa, Artificial Sequence
  source: /note="Description of Artificial Sequence: sequence motif"
NYDIS

SEQ ID NO: 2542 - protein, 17 aa, Artificial Sequence
  source: /note="Description of Artificial Sequence: sequence motif"
WINPDSGNTGYAQKFQG

SEQ ID NO: 2543 - protein, 10 aa, Artificial Sequence
  source: /note="Description of Artificial Sequence: sequence motif"
GGYHAWRTDY

SEQ ID NO: 2544 - protein, 119 aa, Artificial Sequence; identical to SEQ ID NO: 2532
  source: /note="Description of Artificial Sequence: IL-17RA binding protein"

SEQ ID NO: 2545 - protein, 5 aa, Artificial Sequence
  source: /note="Description of Artificial Sequence: sequence motif"
NYDIS

SEQ ID NO: 2546 - protein, 17 aa, Artificial Sequence
  source: /note="Description of Artificial Sequence: sequence motif"
  MOD_RES (3)..(3): Any amino acid
  MOD_RES (5)..(6): Any amino acid
  MOD_RES (17)..(17): Any amino acid
WMXPXXGNTGYAQKFQX

SEQ ID NO: 2547 - protein, 10 aa, Artificial Sequence
  source: /note="Description of Artificial Sequence: sequence motif"
GGYNAWRTDY

SEQ ID NO: 2548 - protein, 119 aa, Artificial Sequence
  source: /note="Description of Artificial Sequence: IL-17RA binding protein"
  MOD_RES (52)..(52): Any amino acid
  MOD_RES (54)..(55): Any amino acid
  MOD_RES (66)..(66): Any amino acid
QVQLVQSGAEVKKPGASVKVSCKASGYTFTNYDISWVRQATGQSLEWMGWMXPXXGNTGYAQKFQXRVTMTRNTSISTAYMELSDLRSEDTAVYFCARGGYNAWRTDYWGQGTLVTVSS

SEQ ID NO: 2549 - protein, 5 aa, Artificial Sequence
  source: /note="Description of Artificial Sequence: sequence motif"
SYDIS

SEQ ID NO: 2550 - protein, 17 aa, Artificial Sequence
  source: /note="Description of Artificial Sequence: sequence motif"
WMNPKSNYTDYTQKFQG

SEQ ID NO: 2551 - protein, 10 aa, Artificial Sequence
  source: /note="Description of Artificial Sequence: sequence motif"
GGSSAWRTDY

SEQ ID NO: 2552 - protein, 119 aa, Artificial Sequence
  source: /note="Description of Artificial Sequence: IL-17RA binding protein"
QVQLVQSGAEVKKPGASVKVSCKASGYTFTSYDISWVRQATGQSLEYMGWMNPKSNYTDYTQKFQGRITMTVDPSISTAYMELSSLRSEDTAVYYCARGGSSAWRTDYWGQGTLVTVSS

SEQ ID NO: 2553 - protein, 5 aa, Artificial Sequence
  source: /note="Description of Artificial Sequence: sequence motif"
NYDIT

SEQ ID NO: 2554 - protein, 17 aa, Artificial Sequence
  source: /note="Description of Artificial Sequence: sequence motif"
WINPNSGNTGYAEKFQG

SEQ ID NO: 2555 - protein, 10 aa, Artificial Sequence
  source: /note="Description of Artificial Sequence: sequence motif"
GNSSTWRTDY

SEQ ID NO: 2556 - protein, 119 aa, Artificial Sequence
  source: /note="Description of Artificial Sequence: IL-17RA binding protein"
QVQLVQSGAEVKKPGASVKVSCKASGYTFTNYDITWVRQATGQSLEWMGWINPNSGNTGYAEKFQGRVTMTRNTSISTAYMELVSLRSEDTAIYFCARGNSSTWRTDYWGQGTPVTVSS

SEQ ID NO: 2557 - protein, 5 aa, Artificial Sequence
  source: /note="Description of Artificial Sequence: sequence motif"
DFDMS

SEQ ID NO: 2558 - protein, 17 aa, Artificial Sequence
  source: /note="Description of Artificial Sequence: sequence motif"
YISSSDSTIYYRDSVKG

SEQ ID NO: 2559 - protein, 14 aa, Artificial Sequence
  source: /note="Description of Artificial Sequence: sequence motif"
NGARYNWNYGDFQH

SEQ ID NO: 2560 - protein, 123 aa, Artificial Sequence
  source: /note="Description of Artificial Sequence: IL-17RA binding protein"
EVQLVESGGGLVKPGGSLRLSCEASGFTFSDFDMSWIRQAPGKGLEWVAYISSSDSTIYYRDSVKGRFTISRDNAKNSLYLQMNSLRAEDTAVYYCSRNGARYNWNYGDFQHWGQGTLVTVSS

SEQ ID NO: 2561 - protein, 5 aa, Artificial Sequence
  source: /note="Description of Artificial Sequence: sequence motif"
DFDMS

SEQ ID NO: 2562 - protein, 17 aa, Artificial Sequence
  source: /note="Description of Artificial Sequence: sequence motif"
YISSSDSTIYYRDSVKG

SEQ ID NO: 2563 - protein, 14 aa, Artificial Sequence
  source: /note="Description of Artificial Sequence: sequence motif"
NGARYNWNYGDFQH

SEQ ID NO: 2564 - protein, 123 aa, Artificial Sequence; identical to SEQ ID NO: 2560
  source: /note="Description of Artificial Sequence: IL-17RA binding protein"

SEQ ID NO: 2565 - protein, 5 aa, Artificial Sequence
  source: /note="Description of Artificial Sequence: sequence motif"
DYYMS

SEQ ID NO: 2566 - protein, 17 aa, Artificial Sequence
  source: /note="Description of Artificial Sequence: sequence motif"
YIGGSDDVIYYRDSVKG

SEQ ID NO: 2567 - protein, 14 aa, Artificial Sequence
  source: /note="Description of Artificial Sequence: sequence motif"
NGARHDWKYGDFQH

SEQ ID NO: 2568 - protein, 123 aa, Artificial Sequence
  source: /note="Description of Artificial Sequence: IL-17RA binding protein"
QVQLVESGGGLVKPGGSLRLSCAASGFAFSDYYMSWIRQAPGKGLEWVSYIGGSDDVIYYRDSVKGRFTISRDNAKNSLYLQMNSLRAEDTAVYYCAKNGARHDWKYGDFQHWGQGTLVTVSS

SEQ ID NO: 2569 - protein, 5 aa, Artificial Sequence
  source: /note="Description of Artificial Sequence: sequence motif"
DYYMS

SEQ ID NO: 2570 - protein, 17 aa, Artificial Sequence
  source: /note="Description of Artificial Sequence: sequence motif"
YIGGSDDVIYYRDSVKG

SEQ ID NO: 2571 - protein, 14 aa, Artificial Sequence
  source: /note="Description of Artificial Sequence: sequence motif"
NGARHDWKYGDFQH

SEQ ID NO: 2572 - protein, 123 aa, Artificial Sequence
  source: /note="Description of Artificial Sequence: IL-17RA binding protein"
QVQLVESGGGLVKPGGSLRLSCAASGFTFSDYYMSWIRQAPGKGLEWVSYIGGSDDVIYYRDSVKGRFTISRDNAKNSLYLQMNSLRAEDTAVYYCAKNGARHDWKYGDFQHWGQGTLVTVSS

SEQ ID NO: 2573 - protein, 5 aa, Artificial Sequence
  source: /note="Description of Artificial Sequence: sequence motif"
DDYMS

SEQ ID NO: 2574 - protein, 17 aa, Artificial Sequence
  source: /note="Description of Artificial Sequence: sequence motif"
YISSSGSTIYYADSVKG

SEQ ID NO: 2575 - protein, 13 aa, Artificial Sequence
  source: /note="Description of Artificial Sequence: sequence motif"
KDITNIAVGSLGY

SEQ ID NO: 2576 - protein, 122 aa, Artificial Sequence
  source: /note="Description of Artificial Sequence: IL-17RA binding protein"
EVQLVESGGGLVKPGGSLRLSCAASGFTFSDDYMSWLRQAPGKGLEWVSYISSSGSTIYYADSVKGRFTISRDNAKNSLYLQMNSLRAEDSAVYYCARKDITNIAVGSLGYWGQGTLVTVSS

SEQ ID NO: 2577 - protein, 5 aa, Artificial Sequence
  source: /note="Description of Artificial Sequence: sequence motif"
NYWMS

SEQ ID NO: 2578 - protein, 17 aa, Artificial Sequence
  source: /note="Description of Artificial Sequence: sequence motif"
NIRPDGSERYYVDSVKG

SEQ ID NO: 2579 - protein, 11 aa, Artificial Sequence
  source: /note="Description of Artificial Sequence: sequence motif"
SRDWGSRAFDI

SEQ ID NO: 2580 - protein, 120 aa, Artificial Sequence
  source: /note="Description of Artificial Sequence: IL-17RA binding protein"
EVQLVESGGGLVQPGGSLRLSCAASGFTFSNYWMSWVRQARGKGLEWVANIRPDGSERYYVDSVKGRFTISRDNAKNSLYLQMSSLRAEDTAVYYCARSRDWGSRAFDIWGQGTMVTVSS

SEQ ID NO: 2581 - DNA, 378 bp, Artificial Sequence
  source: /note="Description of Artificial Sequence: nucleic acid sequence encoding IL-17RA binding peptide sequences"
caggtgcagctggtggagtctgggggaggcttggtacagcctggcaggtccctgagactctcctgtgcagcctctggattcacctttgatgattatgccatgcactgggtccggcaagctccagggaagggcctggagtgggtctcaggtattagttggaatagtggtaggatggactatgcggactctgtgaagggccgattcaccatctccagagacaacgccaagaagtccctgtatctgcaaatgaacagtctgagagctgaggacacggccatgtattactgtgcaaaagagaagggcctaggattttgtcgtggtggtagctgttcctactttgactataggggccagggaaccctggtcaccgtctcctca

SEQ ID NO: 2582 - DNA, 378 bp, Artificial Sequence
  source: /note="Description of Artificial Sequence: nucleic acid sequence encoding IL-17RA binding peptide sequences"
gaggtgcagctggtggagtctgggggaggcttggtacagcctggcaggtccctgagactctcctgtgcagcctctggattcacctttgatgattatgccatgcactgggtccgacaagctccaggaaagggcctggagtgggtctcaggtattagttggaatagtggtaggatggactatgcggactctgtgaagggccgattcaccatctccagagacaacgccaagaactccctgtatctgcaaatgaacagtctgagagctgaggacacggccttatattactgtgcaaaggagaagggcctaggatattgtcgtggtggtagctgttcctactttgactacaggggccagggaaccctggtcaccgtctcctca

SEQ ID NO: 2583 - DNA, 378 bp, Artificial Sequence
  source: /note="Description of Artificial Sequence: nucleic acid sequence encoding IL-17RA binding peptide sequences"
caggtgcagctggtggagtctgggggaggcttggtacagcctggcaggtccctgagactctcctgtgcagcctctggattcacctttgctgattatgccttgcactgggtccggcaagctccagggaagggcctggagtgggtctcaggtattagttggaatagtggtaggaaggactatgcggacactgtgaagggccgattcaccatctccagagacaacgccaagaagtccctgtatctgcaaatgaacagtctgagagctgaggacacggccatgtattactgtgcaaaagagaagggcctaggattttgtcgtggtggtagctgttcctactttgactataggggccagggaaccctggtcaccgtctcctca

SEQ ID NO: 2584 - DNA, 378 bp, Artificial Sequence
  source: /note="Description of Artificial Sequence: nucleic acid sequence encoding IL-17RA binding peptide sequences"
caggtgcagctggtggagtctgggggaggcttggtacagcctggcaggtccctgagactctcctgtgcagcctctggattcacctttgctgattatgccttgcactgggtccggcaagctccagggaagggcctggagtgggtctcaggtattagttggaatgccggtaggaaggactatgcggacactgtgaagggccgattcaccatctccagagacaacgccaagaagtccctgtatctgcaaatgaacagtctgagagctgaggacacggccatgtattactgtgcaaaagagaagggcctaggattttgtcgtggtggtagctgttcctactttgactataggggccagggaaccctggtcaccgtctcctca

SEQ ID NO: 2585 - DNA, 378 bp, Artificial Sequence
  source: /note="Description of Artificial Sequence: nucleic acid sequence encoding IL-17RA binding peptide sequences"
gaggtgcagctggtggagtctgggggaggcttggtacagcctggcaggtccctgagactctcctgtgcagcctctggattcacctttgctgattatgccttgcactgggtccgacaagctccaggaaagggcctggagtgggtctcaggtattagttggaatagtggtaggaaggactatgcggacactgtgaagggccgattcaccatctccagagacaacgccaagaactccctgtatctgcaaatgaacagtctgagagctgaggacacggccttatattactgtgcaaaggagaagggcctaggatattgtcgtggtggtagctgttcctactttgactacaggggccagggaaccctggtcaccgtctcctca

SEQ ID NO: 2586 - DNA, 378 bp, Artificial Sequence
  source: /note="Description of Artificial Sequence: nucleic acid sequence encoding IL-17RA binding peptide sequences"
gaagtgcagctggttgagagcggtggtggtctggttcagccgggtcgcagcctgcgcctgagctgcgcggctagcggctttaccttcgcagattacgccctgcattgggttcgtcaagcaccgggtaaaggcctggagtgggtgtccggcatctcttggaacgcgggtcgtaaggattatgcggacacggtcaagggtcgcttcaccattagccgtgacaatgcgaaaaatagcctgtatttgcagatgaacagcctgcgtgcggaagataccgcgctgtattactgcgcgaaagaaaagggcttgggctattgtcgtggtggcagctgttcgtactttgactaccgtggtcagggtacgctggtgacggtctcgagc

SEQ ID NO: 2587 - DNA, 357 bp, Artificial Sequence
  source: /note="Description of Artificial Sequence: nucleic acid sequence encoding IL-17RA binding peptide sequences"
caggtccagctggtgcagtctggggctgaggtgaagaagcctggggcctcagtgaaggtctcctgcaaggcttctggataccccttcaccagttatgatatcaattgggtgcgacaggccacaggacaaagccttgagtggatgggatggatgaaccctaacagtggtgacacagtctatgcacagaaattccagggcagagtcaccatgaccaggaatacctccataagcacagcctacatggagctgagcagcctgagatctgaggacacggccgtgtatttttgtgcgagaggcagaagggatgactggaagaacaattattggggccagggaaccctggtcactgtctcctca

SEQ ID NO: 2588 - DNA, 357 bp, Artificial Sequence
  source: /note="Description of Artificial Sequence: nucleic acid sequence encoding IL-17RA binding peptide sequences"
caggtccagctggtgcagtctggggctgaggtgaagaagcctggggcctcagtgaaggtctcctgcaaggcttctggataccccttcaccagttatgatatcaattgggtgcgacaggccacaggacgaagccttgagtggatgggatggatgaaccctaccaatggtaacacagtctatgcacagaaattccaggacagagtcaccatgaccaggaatacctccataagcacagcctacatggagctgagcagcctgagatctgaggacacggccgtgtatttttgtgcgagaggcagaagggatgactggaagaacaattattggggccagggaaccctggtcactgtctcctca

SEQ ID NO: 2589 - DNA, 357 bp, Artificial Sequence
  source: /note="Description of Artificial Sequence: nucleic acid sequence encoding IL-17RA binding peptide sequences"
caggtccagctggtgcagtctggggctgaggtgaagaagcctggggcctcagtgaaggtctcctgcaaggcttctggataccccttcaccagttatgatatcaattgggtgcgacaggccacaggacgaagccttgagtggatgggatggatgaaccctacaagtggtgacacagtctatgcacagaaattccaggacagagtcaccatgaccaggaatacctccataagcacagcctacatggagctgagcagcctgagatctgaggacacggccgtgtatttttgtgcgagaggcagaagggataactggaagaacaattattggggccagggaaccctggtcactgtctcctca

SEQ ID NO: 2590 - DNA, 354 bp, Artificial Sequence
  source: /note="Description of Artificial Sequence: nucleic acid sequence encoding IL-17RA binding peptide sequences"
gaggtgcagctggtggagtctgggggaggcttggtccagcctggggggtccctgagactctcctgtgcagcctctggatttccctttagtacctattggatgaggtggctccgccaggctccagggaagggcctggagtgggtggccaacataaaccaagatggaagtgagaaatactatgtggactctgtgaagggccgattcaccatttccagagacaacgccaagagttcactgtttctgcaaatgaacagcctgagagccgaggacacggctgtatattactgtgcgagagggtgggagtcggggtggttcgaaccctggggccagggaaccctggtcaccgtctcctca

SEQ ID NO: 2591 - DNA, 357 bp, Artificial Sequence
  source: /note="Description of Artificial Sequence: nucleic acid sequence encoding IL-17RA binding peptide sequences"
caggttcagctggtgcagtctggggctgaggtgaagaagcctggggcctcagtgaaggtctcctgcaaggcttctggataccccttcaccaattatgatatcagctggatacgacaggccactggacaaagtcttgagtggatgggatggatgaaccctgacagtggtaacacaggctatgcacagaagttccagggcagagtcaccatgaccaggaacacctccataagcacagcctacatggaactgagtggcctgagatctgaggacacggccgtatatttctgtgcgagagggggttacaatgcctggagaacggactactggggccagggcaccctggtcaccgtctcctca

SEQ ID NO: 2592 - DNA, 369 bp, Artificial Sequence
  source: /note="Description of Artificial Sequence: nucleic acid sequence encoding IL-17RA binding peptide sequences"
gaggtgcagctggtggagtctgggggaggcttggtcaagcctggagggtccctgagactctcctgtgaagcctctggattcaccttcagtgacttcgacatgagctggatccgccaggctccagggaaggggctggagtgggttgcatacattagtagtagtgatagtaccatatattatagagactctgtgaagggccgattcaccatttccagggacaacgccaagaactcactgtatctgcaaatgaacagcctgagagccgaagacacggccgtgtattactgttcgagaaacggggcccggtataactggaactacggggacttccagcactggggccagggcaccctggtcactgtctcctca

SEQ ID NO: 2593 - DNA, 366 bp, Artificial Sequence
  source: /note="Description of Artificial Sequence: nucleic acid sequence encoding IL-17RA binding peptide sequences"
gaggtgcagctggtggagtctgggggaggcttggtcaagcctggagggtccctgagactctcctgtgcagcctctggattcaccttcagtgacgactacatgagctggctccgccaggctccagggaaggggctggagtgggtttcatacattagtagtagtggtagtaccatatactacgcagactctgtgaagggccgattcaccatctccagggacaacgccaagaactcactgtatctgcaaatgaacagcctgagagccgaggactcggccgtgtattactgtgcgagaaaagatataacgaatatagcagtgggctccctcggctactggggccagggaaccctggtcaccgtctcctca

SEQ ID NO: 2594 - DNA, 360 bp, Artificial Sequence
  source: /note="Description of Artificial Sequence: nucleic acid sequence encoding IL-17RA binding peptide sequences"
gaggtgcagctggtggagtctgggggaggcttggtccagcctggggggtccctgagactctcctgtgcagcctcaggattcacctttagtaactattggatgagctgggtccgccaggctcgagggaaggggctggagtgggtggccaacataagaccagatggaagtgagcgatactatgtggactctgtgaagggccgattcaccatctccagagacaacgccaagaactcattgtatctgcagatgagcagcctgagagccgaggacacggctgtgtattactgtgcgagatcgagagattggggatctcgggcttttgatatctggggccaagggacaatggtcaccgtctcctca

SEQ ID NO: 2595 - DNA, 73 bp, Artificial Sequence
  source: /note="Description of Artificial Sequence: primer"
gccgctggattgttattactcgcggcccagccggccatggcccaggtbcagctggtgcagtctggggctgagg

SEQ ID NO: 2596 - DNA, 65 bp, Artificial Sequence
  source: /note="Description of Artificial Sequence: primer"
gccgctggattgttattactcgcggcccagccggccatggcccagatcaccttgaaggagtctgg

SEQ ID NO: 2597 - DNA, 71 bp, Artificial Sequence
  source: /note="Description of Artificial Sequence: primer"
gccgctggattgttattactcgcggcccagccggccatggccsaggtgcagctggtggagtctgggggagg

SEQ ID NO: 2598 - DNA, 65 bp, Artificial Sequence
  source: /note="Description of Artificial Sequence: primer"
gccgctggattgttattactcgcggcccagccggccatggcccaggtgcagctgcaggagtcggg

SEQ ID NO: 2599 - DNA, 65 bp, Artificial Sequence
  source: /note="Description of Artificial Sequence: primer"
gccgctggattgttattactcgcggcccagccggccatggcccaggtacagctgcagcagtcagg

SEQ ID NO: 2600 - DNA, 54 bp, Artificial Sequence
  source: /note="Description of Artificial Sequence: primer"
ccgtggtgatggtggtgatggctaccgccaccctcgagtgargagacrgtgacc

SEQ ID NO: 2601 - DNA, 31 bp, Artificial Sequence
  source: /note="Description of Artificial Sequence: primer"
ctcgagggtggcggtagccatcaccaccatc

SEQ ID NO: 2602 - DNA, 29 bp, Artificial Sequence
  source: /note="Description of Artificial Sequence: primer"
tccatggccatcgccggctgggccgcgag

SEQ ID NO: 2603 - protein, 866 aa, Homo sapiens
MGAARSPPSAVPGPLLGLLLLLLGVLAPGGASLRLLDHRALVCSQPGLNCTVKNSTCLDDSWIHPRNLTPSSPKDLQIQLHFAHTQQGDLFPVAHIEWTLQTDASILYLEGAELSVLQLNTNERLCVRFEFLSKLRHHHRRWRFTFSHFVVDPDQEYEVTVHHLPKPIPDGDPNHQSKNFLVPDCEHARMKVTTPCMSSGSLWDPNITVETLEAHQLRVSFTLWNESTHYQILLTSFPHMENHSCFEHMHHIPAPRPEEFHQRSNVTLTLRNLKGCCRHQVQIQPFFSSCLNDCLRHSATVSCPEMPDTPEPIPDYMPLWVYWFITGISILLVGSVILLIVCMTWRLAGPGSEKYSDDTKYTDGLPAADLIPPPLKPRKVWIIYSADHPLYVDVVLKFAQFLLTACGTEVALDLLEEQAISEAGVMTWVGRQKQEMVESNSKIIVLCSRGTRAKWQALLGRGAPVRLRCDHGKPVGDLFTAAMNMILPDFKRPACFGTYVVCYFSEVSCDGDVPDLFGAAPRYPLMDRFEEVYFRIQDLEMFQPGRMHRVGELSGDNYLRSPGGRQLRAALDRFRDWQVRCPDWFECENLYSADDQDAPSLDEEVFEEPLLPPGTGIVKRAPLVREPGSQACLAIDPLVGEEGGAAVAKLEPHLQPRGQPAPQPLHTLVLAAEEGALVAAVEPGPLADGAAVRLALAGEGEACPLLGSPGAGRNSVLFLPVDPEDSPLGSSTPMASPDLLPEDVREHLEGLMLSLFEQSLSCQAQGGCSRPAMVLTDPHTPYEEEQRQSVQSDQGYISRSSPQPPEGLTEMEEEEEEEQDPGKPALPLSPEDLESLRSLQRQLLFRQLQKNSGWDTMGSESEGPSA

SEQ ID NO: 2604 - protein, 123 aa, Artificial Sequence
  source: /note="Description of Artificial Sequence: IL-17RA binding protein"
QVQLVESGGGLVQPGRSLTLSCTASGFTFHDYAMHWVRQPPGGGLEWVAGVSWNGNNVGYADSVKGRFTISRDNAKKSLYLQMNSLRSEDTALYYCAKGGMGSGSHPDSFSTWGQGTMVTVSS

SEQ ID NO: 2605 - protein, 6 aa, Artificial Sequence
  source: /note="Description of Artificial Sequence: 6xHis tag"
HHHHHH

SEQ ID NO: 2606 - protein, 12 aa, Artificial Sequence
  source: /note="Description of Artificial Sequence: peptide"
LEGGGSHHHHHH
